(19) United States
(12) Patent Application Publication
(10) Pub. No.: US 2008/0213878 A1
(43) Pub. Date: Sep. 4, 2008

(54) Novel human membrane proteins and polynucleotides encoding the same

(76) Inventors: Gregory Donoho, Indianapolis, IN (US); Carl Johan Friddle, The Woodlands, TX (US); Glenn Friedrich, Houston, TX (US); Brenda Gerhardt, Spring, TX (US); Erin Hilbun, Denton, TX (US); Yi Hu, Spring, TX (US); Brian Mathur, Nashville, TN (US); Maricar Miranda, The Woodlands, TX (US); Michael C. Nehls, Stockdorf (DE); Boris Nepomnichy, Dickinson, TX (US); Arthur T. Sands, The Woodlands, TX (US); John Scoville, Pearland, TX (US); Hong Sun, Bellevue, WA (US); C. Alexander Turner, The Woodlands, TX (US); D. Wade Walke, Spring, TX (US); Xiaoming Wang, Burr Ridge, IL (US); Nathaniel L. Wilganowski, Spring, TX (US); Xuanchuan Yu, Conroe, TX (US); Brian Zambrowicz, The Woodlands, TX (US)

Correspondence Address: LEXICON PHARMACEUTICALS, INC., 8800 TECHNOLOGY FOREST PLACE, THE WOODLANDS, TX, 77381-1160, US

(21) Appl. No.: 11/365,756

(22) Filed: Mar. 1, 2006

Related U.S. Application Data
(63) Continuation-in-part of application No. 10/813,588, filed on Mar. 30, 2004, now abandoned.
Application No. 10/813,588 is a continuation of application No. 09/691,344, filed on Oct. 18, 2000, now Pat. No. 6,743,907.
Application No. 09/691,344 is a continuation-in-part of application No. 10/941,305, filed on Sep. 15, 2004, now abandoned.
Application No. 10/941,305 is a continuation of application No. 09/813,290, filed on Mar. 20, 2001, now Pat. No. 6,815,538.
Application No. 09/813,290 is a continuation-in-part of application No. 10/980,986, filed on Nov. 4, 2004, now abandoned.
Application No. 10/980,986 is a continuation of application No. 09/818,990, filed on Mar. 27, 2001, now abandoned.
Application No. 09/818,990 is a continuation-in-part of application No. 10/833,509, filed on Apr. 28, 2004, now Pat. No. 7,199,221.
Application No. 10/833,509 is a continuation of application No. 09/854,845, filed on May 14, 2001, now Pat. No. 6,750,054.
Application No. 09/854,845 is a continuation-in-part of application No. 10/090,427, filed on Feb. 28, 2002, now abandoned.
Application No. 10/090,427 is a continuation-in-part of application No. 10/919,053, filed on Aug. 16, 2004, now abandoned.
Application No. 10/919,053 is a continuation of application No. 10/090,516, filed on Mar. 1, 2002, now abandoned.
Application No. 10/090,516 is a continuation-in-part of application No. 10/972,983, filed on Oct. 25, 2004, now abandoned.
Application No. 10/972,983 is a continuation of application No. 10/092,390, filed on Mar. 6, 2002, now abandoned.
Application No. 10/092,390 is a continuation-in-part of application No. 10/895,162, filed on Jul. 20, 2004, now abandoned.
Application No. 10/895,162 is a continuation of application No. 10/109,528, filed on Mar. 27, 2002, now abandoned.
Application No. 10/109,528 is a continuation-in-part of application No. 11/194,496, filed on Aug. 1, 2005, now abandoned.
Application No. 11/194,496 is a continuation of application No. 10/139,136, filed on May 3, 2002, now abandoned.
Application No. 10/139,136 is a continuation-in-part of application No. 11/195,579, filed on Aug. 2, 2005, now abandoned.
Application No. 11/195,579 is a continuation of application No. 10/141,670, filed on May 7, 2002, now abandoned.
Application No. 10/141,670 is a continuation-in-part of application No. 10/141,260, filed on May 7, 2002, now abandoned.
Application No. 10/141,260 is a continuation-in-part of application No. 11/260,505, filed on Oct. 27, 2005, now abandoned.
Application No. 11/260,505 is a continuation of application No. 10/180,477, filed on Jun. 25, 2002, now abandoned.
Application No. 10/180,477 is a continuation-in-part of application No. 11/177,675, filed on Jul. 8, 2005, now abandoned.
Application No. 11/177,675 is a continuation of application No. 10/225,566, filed on Aug. 21, 2002, now abandoned.
Application No. 10/225,566 is a continuation-in-part of application No. 10/962,211, filed on Oct. 8, 2004, now abandoned.
Application No. 10/962,211 is a continuation of application No. 10/225,565, filed on Aug. 21, 2002, now abandoned.
(60) Provisional application No. 60/183,583, filed on Feb. 18, 2000.
(60) Provisional application No. 60/160,285, filed on Oct. 19, 1999.
(60) Provisional application No. 60/193,639, filed on Mar. 31, 2000.
(60) Provisional application No. 60/191,188, filed on Mar. 22, 2000.
(60) Provisional application No. 60/190,638, filed on Mar. 20, 2000.
(60) Provisional application No. 60/192,218, filed on Mar. 27, 2000.
(60) Provisional application No. 60/208,893, filed on Jun. 2, 2000.
(60) Provisional application No. 60/205,274, filed on May 18, 2000.
(60) Provisional application No. 60/274,963, filed on Mar. 12, 2001.
(60) Provisional application No. 60/275,011, filed on Mar. 12, 2001.
(60) Provisional application No. 60/275,013, filed on Mar. 12, 2001.
(60) Provisional application No. 60/279,161, filed on Mar. 27, 2001.
(60) Provisional application No. 60/288,541, filed on May 3, 2001.
(60) Provisional application No. 60/289,726, filed on May 9, 2001.
(60) Provisional application No. 60/289,423, filed on May 8, 2001.
(60) Provisional application No. 60/289,424, filed on May 8, 2001.
(60) Provisional application No. 60/301,606, filed on Jun. 28, 2001.
(60) Provisional application No. 60/313,877, filed on Aug. 21, 2001.
(60) Provisional application No. 60/314,052, filed on Aug. 22, 2001.

(51) Int. Cl. C12N 15/00; C12N 15/11; C07K 14/00; C07K 16/18

(52) U.S. Cl. 435/320.1; 536/23.5; 530/350; 530/387.9

(57) ABSTRACT

Novel human polynucleotide and polypeptide sequences are disclosed that can be used in therapeutic, diagnostic, and pharmacogenomic applications.

### 1.0 CROSS-REFERENCE TO RELATED APPLICATIONS

[0001] The present application is a continuation-in-part of: co-pending U.S. application Ser. No. 10/813,588, filed on Mar. 30, 2004, which is a continuation of U.S. application Ser. No. 09/691,344, filed on Oct. 18, 2000, which issued as U.S. Pat. No. 6,743,907 B1 on Jun. 1, 2004, which claims the benefit of U.S. Provisional Application Nos. 60/183,583, filed on Feb. 18, 2000, and 60/160,285, filed on Oct. 19, 1999; co-pending U.S. application Ser. No. 10/941,305, filed on Sep. 15, 2004, which is a continuation of U.S. application Ser. No. 09/813,290, filed on Mar. 20, 2001, which issued as U.S. Pat. No. 6,815,538 B2 on Nov. 9, 2004, which claims the benefit of U.S. Provisional Application Nos. 60/193,639, filed on Mar. 31, 2000, 60/191,188, filed on Mar. 22, 2000, and 60/190,638, filed on Mar. 20, 2000; co-pending U.S. application Ser. No. 10/980,986, filed on Nov. 4, 2004, which is a continuation of U.S. application Ser. No. 09/818,990, filed on Mar. 27, 2001, abandoned, which claims the benefit of U.S. Provisional Application No. 60/192,218, filed on Mar. 27, 2000; co-pending U.S. application Ser. No. 10/833,509, filed on Apr. 28, 2004, which is a continuation of U.S. application Ser. No. 09/854,845, filed on May 14, 2001, which issued as U.S. Pat. No. 6,750,054 B2 on Jun. 15, 2004, which claims the benefit of U.S. Provisional Application Nos. 60/208,893, filed on Jun. 2, 2000, and 60/205,274, filed on May 18, 2000; co-pending U.S. application Ser. No. 10/090,427, filed on Feb. 28, 2002, which claims the benefit of U.S. Provisional Application No. 60/274,963, filed on Mar. 12, 2001; co-pending U.S. Application Serial Number 10/919,053, filed on Aug. 16, 2004, which is a continuation of U.S. application Ser. No. 10/090,516, filed on Mar. 1, 2002, abandoned, which claims the benefit of U.S. Provisional Application No. 60/275,011, filed on Mar. 12, 2001; co-pending U.S. application Ser. No. 10/972,983, filed on Oct. 25, 2004, which is a continuation of U.S. application Ser. No. 10/092,390, filed on Mar. 6, 2002, abandoned, which claims the benefit of U.S. Provisional Application No. 60/275,013, filed on Mar. 12, 2001; co-pending U.S. application Ser. No. 10/895,162, filed on Jul. 20, 2004, which is a continuation of U.S. application Ser. No. 10/109,528, filed on Mar. 27, 2002, abandoned, which claims the benefit of U.S. Provisional Application No. 60/279,161, filed on Mar. 27, 2001; co-pending U.S. application Ser. No. 11/194,496, filed on Aug. 1, 2005, which is a continuation of U.S. application Ser. No. 10/139,136, filed on May 3, 2002, abandoned, which claims the benefit of U.S. Provisional Application No. 60/288,541, filed on May 3, 2001; co-pending U.S. application Ser. No. 11/195,579, filed on Aug. 2, 2005, which is a continuation of U.S. application Ser. No. 10/141,670, filed on May 7, 2002, abandoned, which claims the benefit of U.S. Provisional Application Nos. 60/289,726, filed on May 9, 2001, and 60/289,423, filed on May 8, 2001; co-pending U.S. application Ser. No. 10/141,260, filed on May 7, 2002, which claims the benefit of U.S. Provisional Application No. 60/289,424, filed on May 8, 2001; co-pending U.S. application Ser. No. 11/260,505, filed on Oct. 27, 2005, which is a continuation of U.S. application Ser. No. 10/180,477, filed on Jun. 25, 2002, abandoned, which claims the benefit of U.S. Provisional Application No. 60/301,606, filed on Jun. 28, 2001; co-pending U.S. application Ser. No. 11/177,675, filed on Jul. 8, 2005, which is a continuation of U.S. application Ser. No. 10/225,566, filed on Aug. 21, 2002, abandoned, which claims the benefit of U.S. Provisional Application No. 60/313,877, filed on Aug. 21, 2001; and co-pending U.S. application Ser. No. 10/962,211, filed on Oct. 8, 2004, which is a continuation of U.S. application Ser. No. 10/225,565, filed on Aug. 21, 2002, abandoned, which claims the benefit of U.S. Provisional Application No. 60/314,052, filed on Aug. 22, 2001; each of which is herein incorporated by reference in its entirety.

### 2.0 CROSS-REFERENCE TO SEQUENCE LISTING SUBMITTED ON COMPACT DISC

[0002] The present application contains a Sequence Listing of SEQ ID NOS:1-163, in file “FINALSeqList.txt” (1,492,992 bytes), created on Mar. 1, 2006, submitted herewith on duplicate compact disc (Copy 1 and Copy 2), which is herein incorporated by reference in its entirety.

### 3.0 INTRODUCTION

[0003] The present invention relates to the discovery, identification, and characterization of novel human polynucleotides encoding proteins that share sequence similarity with mammalian membrane and secreted proteins. The invention encompasses the described polynucleotides, host cell expression systems, the encoded proteins, fusion proteins, polypeptides and peptides, antibodies to the encoded proteins and peptides, and genetically engineered animals that either lack or overexpress the disclosed polynucleotides, antagonists and agonists of the proteins, and other compounds that modulate the expression or activity of the proteins encoded by the disclosed polynucleotides, which can be used for diagnosis, drug screening, clinical trial monitoring, the treatment of diseases and disorders, and cosmetic or nutriceutical applications.

### 4.0 BACKGROUND OF THE INVENTION

[0004] In addition to providing the structural and mechanical scaffolding for cells and tissues, membrane proteins can also serve as recognition markers, mediate signal transduction, mediate or facilitate the passage of materials across the lipid bilayer, and can act as adhesion proteins that facilitate tissue organization, development, and integrity.

[0005] The CUB domain is an extracellular domain (ECD) present in variety of diverse proteins such as bone morphogenetic protein 1, proteinases, spermadhesins, complement subcomponents, and neuronal recognition molecules. Given the importance of these functions, CUB proteins have been associated with, inter alia, regulating development, modulating cellular processes, modulating ligand-receptor interactions, and preventing infectious disease. Ig-domain proteins are typically membrane-associated proteins that bind receptors and ligands, and can participate in signal transduction.

[0006] Secreted proteins are biologically active molecules that have been implicated in a number of biological processes and anomalies such as hyperproliferative disorders, muscle contraction, vasoconstriction and dilation, immunity, development, modulating metabolism, and cancer. In particular, protein hormones have been implicated in, inter alia, autoimmunity, diabetes, osteoporosis, infectious disease, arthritis, and modulating physiological homeostasis, metabolism, and behavior. Examples of biologically active secreted proteins include, but are not limited to, semaphorins which have been implicated in, inter alia, mediating neural processes, axon guidance, cancer, and development. Along with their cognate receptors (i.e., neuropilins or plexins), semaphorins act to regulate the organization and fasciculation of nerves in the body.

### 5.0 SUMMARY OF THE INVENTION

[0007] The present invention relates to the discovery, identification, and characterization of nucleotides that encode novel human proteins, and the corresponding amino acid sequences of these proteins. The novel human proteins, described for the first time herein, share structural similarity with: animal CUB domain proteins, coagulation factors V and XIII, milk fat globule-EGF factor 8, transcriptional repressor AE-binding protein-1, and neuropilins 1 and 2, which contain both CUB and discoidin domains (SEQ ID NOS:1-7); animal secreted proteins such as semaphorin and collapsin proteins (SEQ ID NOS: 8-12); animal secreted proteins such as protein/peptide hormones of the neurohypophysial family (SEQ ID NOS:13 and 14); animal secreted proteins such as protein/peptide hormones of the oxytocin (neurophysin 1 precursor) family (SEQ ID NOS:15-17); mammalian muscle proteins (myosin light chain kinase, telokin, IgG like C2 domains, myotilin), modifiers and anchors thereof, and sequences that are similar to various domains (i.e., kinase, Ig, adhesin, etc.) within the mammalian titin protein (SEQ ID NOS:18-45); mammalian semaphorin proteins, particularly semaphorin G and F (SEQ ID NOS:46-62); mammalian semaphorin proteins, particularly semaphorin G (subclass 4) and semaphorin F (SEQ ID NOS:63-95); mammalian semaphorin proteins, particularly semaphorin 6A1 (SEQ ID NOS:96-108); mammalian membrane proteins such as the murine TEN-M4/cdz protein (a dimeric type II transmembrane protein that apparently represents the murine ortholog of the described sequences), and proteins identified as gamma-heregulins (SEQ ID NOS:109-112); mammalian membrane proteins of the epidermal growth factor (EGF) family, and notch proteins (SEQ ID NOS:113-116); mammalian adhesin and cell polarity proteins, and proteins having structural domains in common with proteins associated with cell adhesion and/or tissue organization and integrity (SEQ ID NOS:117-125); mammalian proteins having structural domains in common with proteins of the immunoglobulin (Ig) super family, which are often found on the cell surface and can be used in signaling pathways, receptor-mediated interactions, and can be exploited by human pathogens to gain entry to the cell, and more particularly, the murine Punc gene (SEQ ID NOS:126 and 127); mammalian proteins having structural domains in common with proteins of the immunoglobulin (Ig) super family (SEQ ID NOS:128 and 129); mammalian proteins having structural domains in common with laminin G proteins, thrombospondins, and proteins of the cadherin and protocadherin family (SEQ ID NOS:130-132); proteins of the MUNC family, which have been implicated in neural development and function (SEQ ID NOS:133-136); mammalian semaphorin receptors, and particularly plexins (SEQ ID NOS:137-148); mammalian proteins having structural domains in common with proteins of the immunoglobulin (Ig) super family, and particularly, human immunoglobulin receptors (SEQ ID NOS:149-156); mammalian glycoproteins, secreted proteins, and receptors, particularly proteins characterized by the presence of at least one Ig-domain, such as CEA-related cell adhesion molecule, mouse hepatitis virus receptor, biliary glycoprotein 1, carcinoembryonic antigen 7 and 1, and Rig-1, see GenBank Accession Number XM_{—}166754 (SEQ ID NOS:157 and 158); and animal CUB domain and “sushi” domain proteins, and proteins such as vascular endothelial cell growth factor and neuropilins (SEQ ID NOS:159-163).

[0008] The novel human nucleic acid sequences described herein (SEQ ID NOS:1, 3, 5, 8, 10, 13, 15, 18, 20, 22, 24, 26, 28, 30, 32, 34, 36, 38, 40, 42, 44, 46, 48, 50, 52, 54, 56, 58, 60, 63, 65, 67, 69, 71, 73, 75, 77, 79, 81, 83, 85, 87, 89, 91, 93, 96, 98, 100, 102, 104, 106, 109, 111, 113, 115, 117, 119, 122, 124, 126, 128, 130, 133, 135, 137, 139, 141, 143, 145, 147, 149, 151, 154, 157, 159, and 161) encode proteins/open reading frames (ORFs) of 487, 586, 539, 875, 782, 91, 89, 1320, 376, 419, 401, 459, 570, 754, 1045, 102, 144, 126, 184, 295, 479, 1049, 1093, 1034, 1078, 1151, 1136, 954, 939, 215, 496, 702, 697, 843, 838, 870, 865, 116, 397, 603, 598, 744, 739, 771, 766, 1073, 998, 476, 1060, 985, 463, 2753, 1624, 1140, 586, 1285, 1012, 955, 448, 814, 2623, 3846, 2214, 1703, 2013, 1948, 1959, 1894, 1974, 1909, 776, 221, 666, 416, 301, and 185 amino acids in length (SEQ ID NOS:2, 4, 6, 9, 11, 14, 16, 19, 21, 23, 25, 27, 29, 31, 33, 35, 37, 39, 41, 43, 45, 47, 49, 51, 53, 55, 57, 59, 61, 64, 66, 68, 70, 72, 74, 76, 78, 80, 82, 84, 86, 88, 90, 92, 94, 97, 99, 101, 103, 105, 107, 110, 112, 114, 116, 118, 120, 123, 125, 127, 129, 131, 134, 136, 138, 140, 142, 144, 146, 148, 150, 152, 155, 158, 160, and 162). SEQ ID NOS:7, 12, 17, 62, 95, 108, 121, 132, 153, 156, and 163 describe full length ORFs, as well as flanking 5′ and 3′ sequences.

[0009] The invention also encompasses agonists and antagonists of the described proteins, including small molecules, large molecules, mutant proteins, or portions thereof, that compete with native proteins, peptides, and antibodies, as well as nucleotide sequences that can be used to inhibit the expression of the described proteins (e.g., antisense and ribozyme molecules, and open reading frame or regulatory sequence replacement constructs) or to enhance the expression of the described proteins (e.g., expression constructs that place the described polynucleotide under the control of a strong promoter system), and transgenic animals that express a described protein sequence, or “knock-outs” (which can be conditional) that do not express a functional protein. Knock-out mice can be produced in several ways, one of which involves the use of mouse embryonic stem cell (“ES cell”) lines that contain gene trap mutations in a murine homolog of at least one of the described proteins. When the unique sequences described in SEQ ID NOS:1-163 are “knocked-out” they provide a method of identifying phenotypic expression of the particular gene, as well as a method of assigning function to previously unknown genes. In addition, animals in which the unique sequences described in SEQ ID NOS:1-163 are “knocked-out” provide an unique source in which to elicit antibodies to homologous and orthologous proteins, which would have been previously viewed by the immune system as “self” and therefore would have failed to elicit significant antibody responses. To these ends, gene trapped knock-out ES cells have been generated in murine homologs of a number of the described membrane proteins.

[0010] Additionally, the unique sequences described in SEQ ID NOS:1-163 are useful for the identification of protein coding sequences, and mapping an unique gene to a particular chromosome. These sequences identify biologically verified exon splice junctions, as opposed to splice junctions that may have been bioinformatically predicted from genomic sequence alone. The sequences of the present invention are also useful as additional DNA markers for restriction fragment length polymorphism (RFLP) analysis, and in forensic biology, particularly given the presence of multiple nucleotide polymorphisms within the described sequences.

[0011] Further, the present invention also relates to processes for identifying compounds that modulate, i.e., act as agonists or antagonists of, expression and/or activity of the described proteins that utilize purified preparations of the described sequences and/or protein products, or cells expressing the same. Such compounds can be used as therapeutic agents for the treatment of any of a wide variety of symptoms associated with biological disorders or imbalances.

### 6.0 BRIEF DESCRIPTION OF THE FIGURES

[0012] No Figures are required in the present invention.

### 7.0 DETAILED DESCRIPTION OF THE INVENTION

[0013] The sequences described for the first time herein encode novel proteins that may be expressed in, inter alia, human cell lines, and: human prostate, pituitary, fetal brain, brain, thymus, spleen, lymph node, trachea, kidney, fetal liver, thyroid, adrenal gland, salivary gland, stomach, small intestine, colon, muscle, heart, mammary gland, adipose, skin, esophagus, bladder, cervix, rectum, and testis cells (SEQ ID NOS:1-7); human fetal brain, brain, cerebellum, thymus, spleen, lymph node, kidney, uterus, adipose, esophagus, cervix, rectum, pericardium, and placenta cells (SEQ ID NOS:8-12); human fetal brain, brain, pituitary, cerebellum, spinal cord, thymus, spleen, lymph node, bone marrow, trachea, kidney, fetal liver, prostate, testis, thyroid, adrenal gland, stomach, small intestine, colon, skeletal muscle, adipose, and esophagus cells (SEQ ID NOS:13 and 14); human fetal brain, brain, cerebellum, thymus, kidney, fetal liver, prostate, skeletal muscle, esophagus, rectum, pericardium, and fetal kidney cells (SEQ ID NOS:15-17); human bone marrow, trachea, fetal liver, prostate, testis, thyroid, adrenal gland, skeletal muscle, esophagus, and pericardium cells (SEQ ID NOS:18-45); human brain, pituitary, cerebellum, kidney, prostate, testis, thyroid, adrenal gland, pancreas, salivary gland, heart, uterus, cervix, pericardium, fetal kidney and fetal lung cells (SEQ ID NOS:46-62); human brain, fetal brain, lymph node, mammary gland, pituitary gland, placenta, prostate, kidney, thyroid, and umbilical vein endothelial cells (SEQ ID NOS:63-95); human fetal brain, pituitary, cerebellum, spinal cord, lymph node, lung, kidney, prostate, thyroid, adrenal gland, small intestine, colon, skeletal muscle, uterus, placenta, mammary gland, skin, esophagus, bladder, pericardium, fetal kidney, fetal lung, 6-, 9-, and 12-week embryo, and embryonic carcinoma cells (SEQ ID NOS:96-108); human fetal brain, pituitary, spinal cord, lymph node, thyroid, adrenal gland, fetal kidney, fetal lung, and 6- and 9-week old embryo cells (SEQ ID NOS:109-112); human prostate, pituitary, skeletal muscle, fetal brain, brain, adrenal gland, and osteosarcoma cells (SEQ ID NOS:113-116); human fetal brain, cerebellum, spinal cord, lymph node, bone marrow, kidney, fetal kidney, 6- and 9-week embryo, and osteosarcoma cells (SEQ ID NOS:117 and 118); human fetal brain, brain, pituitary, spinal cord, thymus, lymph node, trachea, lung, testis, thyroid, salivary gland, stomach, small intestine, heart, uterus, mammary gland, adipose, skin, fetal kidney, fetal lung, aorta, 6- and 12-week embryo, adenocarcinoma, osteosarcoma, and embryonic carcinoma cells (SEQ ID NOS:119-121); human fetal brain, brain, pituitary, cerebellum, spinal cord, thymus, spleen, lymph node, bone marrow, trachea, lung, kidney, prostate, testis, thyroid, adrenal gland, salivary gland, stomach, small intestine, skeletal muscle, heart, uterus, placenta, mammary gland, adipose, skin, esophagus, bladder, cervix, rectum, pericardium, hypothalamus, ovary, fetal kidney, fetal lung, gall bladder, tongue, aorta, 6-, 9-, and 12-week embryo, adenocarcinoma, osteosarcoma, embryonic carcinoma, umbilical vein, and endothelial cells (SEQ ID NOS:122-125); human fetal brain, brain, cerebellum, spinal cord, thymus, lymph node, prostate, testis, thyroid, uterus, placenta, hypothalamus, fetal kidney, fetal lung, tongue, 6-, 9-, and 12-week embryo, adenocarcinoma, and embryonic carcinoma cells (SEQ ID NOS:126 and 127); human fetal brain, brain, pituitary, cerebellum, spinal cord, thymus, spleen, lymph node, bone marrow, trachea, kidney, fetal liver, liver, prostate, testis, thyroid, adrenal gland, pancreas, salivary gland, stomach, small intestine, colon, skeletal muscle, heart, uterus, placenta, mammary gland, adipose, skin, esophagus, bladder, cervix, pericardium, hypothalamus, ovary, fetal kidney, fetal lung, 6-, 9-, and 12-week embryo, and osteosarcoma cells (SEQ ID NOS:128 and 129); human fetal brain, brain, pituitary, cerebellum, spinal cord, thymus, spleen, lymph node, bone marrow, trachea, lung, kidney, fetal liver, liver, prostate, testis, thyroid, adrenal gland, pancreas, salivary gland, stomach, small intestine, colon, skeletal muscle, heart, uterus, placenta, mammary gland, adipose, skin, esophagus, bladder, cervix, pericardium, ovary, fetal kidney, fetal lung, gall bladder, tongue, aorta, 6-, 9-, and 12-week old embryo, adenocarcinoma, osteosarcoma, embryonic carcinoma, umbilical vein, and microvascular endothelial cells (SEQ ID NOS:130-132); human fetal brain, brain, cerebellum, spinal cord, thymus, lymph node, bone marrow, trachea, lung, kidney, fetal liver, liver, prostate, testis, thyroid, adrenal gland, pancreas, salivary gland, stomach, small intestine, colon, skeletal muscle, heart, uterus, placenta, mammary gland, adipose, skin, esophagus, bladder, cervix, rectum, pericardium, hypothalamus, ovary, fetal kidney, fetal lung, gall bladder, tongue, aorta, 6-, 9-, and 12-week old embryo, adenocarcinoma, osteosarcoma, and embryonic carcinoma cells (SEQ ID NOS:133 and 134); human fetal brain, brain, cerebellum, spinal cord, lymph node, testis, adrenal gland, uterus, hypothalamus, 6- and 9-week old embryo, and osteosarcoma cells (SEQ ID NOS:135 and 136); human fetal brain, brain, pituitary, cerebellum, spinal cord, thymus, spleen, lymph node, bone marrow, trachea, lung, kidney, fetal liver, liver, prostate, testis, thyroid, adrenal gland, pancreas, salivary gland, stomach, small intestine, colon, skeletal muscle, heart, uterus, placenta, mammary gland, adipose, skin, esophagus, bladder, cervix, rectum, pericardium, hypothalamus, ovary, fetal kidney, fetal lung, gall bladder, tongue, aorta, 6-, 9-, and 12-week embryo, adenocarcinoma, osteosarcoma, embryonic carcinoma, and endothelial cells (SEQ ID NOS:137-148); human spleen, lymph node, and bone marrow cells (SEQ ID NOS:149-153); human thymus, lymph node, bone marrow, trachea, thyroid, adrenal gland, stomach, lung, mammary gland, fetal kidney, and fetal lung cells (SEQ ID NOS:154-156); human fetal brain, cerebellum, spinal cord, lymph node, trachea, testis, adrenal gland, mammary gland, adipose, esophagus, hypothalamus, fetal kidney, and fetal lung cells (SEQ ID NOS:157 and 158); and human fetal brain, brain, cerebellum, spinal cord, thymus, spleen, lymph node, bone marrow, trachea, lung, kidney, fetal liver, liver, prostate, testis, thyroid, adrenal gland, pancreas, salivary gland, stomach, small intestine, colon, skeletal muscle, heart, uterus, placenta, mammary gland, adipose, skin, esophagus, bladder, cervix, rectum, pericardium, hypothalamus, ovary, fetal kidney, fetal lung, gall bladder, tongue, aorta, 6-, 9-, and 12-week embryo, adenocarcinoma, and umbilical vein endothelial cells (SEQ ID NOS:159-163).

[0014] The present invention encompasses the nucleotides presented in the Sequence Listing, host cells expressing such nucleotides, the expression products of such nucleotides, and: (a) nucleotides that encode mammalian homologs of the described polynucleotides, including the specifically described nucleic acid sequences and protein products; (b) nucleotides that encode one or more portions of the proteins that correspond to functional domains, and the polypeptide products specified by such nucleotide sequences, including, but not limited to, the novel regions of any active domain(s); (c) isolated nucleotides that encode mutant versions, engineered or naturally occurring, of the described sequences, in which all or a part of at least one domain is deleted or altered, and the polypeptide products specified by such nucleotide sequences, including, but not limited to, soluble proteins and peptides in which all or a portion of the signal (or hydrophobic transmembrane) sequence is deleted; (d) nucleotides that encode chimeric fusion proteins containing all or a portion of the described coding regions, or one of its domains (e.g., a receptor or ligand binding domain, accessory protein/self-association domain, etc.), fused to another peptide or polypeptide; or (e) therapeutic or diagnostic derivatives of the described polynucleotides, such as oligonucleotides, antisense polynucleotides, ribozymes, dsRNA, or gene therapy constructs comprising a sequence first disclosed in the Sequence Listing.

[0015] As discussed above, the present invention includes the human DNA sequences presented in the Sequence Listing (and vectors comprising the same), and additionally contemplates any nucleotide sequence encoding a contiguous open reading frame (ORF) that hybridizes to a complement of a DNA sequence presented in the Sequence Listing under highly stringent conditions, e.g., hybridization to filter-bound DNA in 0.5 M NaHPO₄, 7% sodium dodecyl sulfate (SDS), 1 mM EDTA at 65° C., and washing in 0.1×SSC/0.1% SDS at 68° C. (“Current Protocols in Molecular Biology”, Vol. 1, p. 2.10.3 (Ausubel et al., eds., Green Publishing Associates, Inc., and John Wiley & Sons, Inc., New York, 1989)) and encodes a functionally equivalent expression product. Additionally contemplated are any nucleotide sequences that hybridize to the complement of a DNA sequence that encodes and expresses an amino acid sequence presented in the Sequence Listing under moderately stringent conditions, e.g., washing in 0.2×SSC/0.1% SDS at 42° C. (“Current Protocols in Molecular Biology”, supra), yet still encodes a functional equivalent of the described membrane proteins. Functional equivalents of the described membrane proteins include naturally occurring membrane proteins present in other species, and mutant membrane proteins, whether naturally occurring or engineered (by site directed mutagenesis, gene shuffling, directed evolution as described in, for example, U.S. Pat. No. 5,837,458). The invention also includes degenerate nucleic acid variants of the disclosed membrane protein polynucleotide sequences.

[0016] Additionally contemplated are polynucleotides encoding membrane protein ORFs, or their functional equivalents, encoded by polynucleotide sequences that are about 99, 95, 90, or about 85 percent similar or identical to corresponding regions of the nucleotide sequences of the Sequence Listing (as measured by BLAST sequence comparison analysis using, for example, the GCG sequence analysis package (the University of Wisconsin GCG sequence analysis package, SEQUENCHER 3.0, Gene Codes Corp., Ann Arbor, Mich.) using default settings).

[0017] The invention also includes nucleic acid molecules, preferably DNA molecules, that hybridize to, and are therefore the complements of, the described nucleotide sequences. Such hybridization conditions may be highly stringent or less highly stringent, as described herein. In instances where the nucleic acid molecules are deoxyoligonucleotides, such molecules are generally about 16 to about 100 bases long, or about 20 to about 80 bases long, or about 34 to about 45 bases long, or any variation or combination of sizes represented therein that incorporate a contiguous region of sequence first disclosed in the Sequence Listing. Such oligonucleotides can be used in conjunction with the polymerase chain reaction (PCR) to screen libraries, isolate clones, and prepare cloning and sequencing templates, etc.

[0018] Alternatively, such oligonucleotides can be used as hybridization probes for screening libraries, and assessing gene expression patterns (particularly using a microarray or high-throughput “chip” format). Additionally, a series of oligonucleotide sequences, or the complements thereof, can be used to represent all or a portion of the described nucleic acid sequences. An oligonucleotide or polynucleotide sequence first disclosed in at least a portion of one or more of the sequences of SEQ ID NOS:1-163 can be used as a hybridization probe in conjunction with a solid support matrix/substrate (resins, beads, membranes, plastics, polymers, metal or metallized substrates, crystalline or polycrystalline substrates, etc.). Of particular note are spatially addressable arrays (i.e., gene chips, microtiter plates, etc.) of oligonucleotides and polynucleotides, or corresponding oligopeptides and polypeptides, wherein at least one of the biopolymers present on the spatially addressable array comprises an oligonucleotide or polynucleotide sequence first disclosed in at least one of the sequences of SEQ ID NOS:1-163, or an amino acid sequence encoded thereby. Methods for attaching biopolymers to, or synthesizing biopolymers on, solid support matrices, and conducting binding studies thereon, are disclosed in, inter alia, U.S. Pat. Nos. 5,700,637, 5,556,752, 5,744,305, 4,631,211, 5,445,934, 5,252,743, 4,713,326, 5,424,186, and 4,689,405.

[0019] Addressable arrays comprising sequences first disclosed in SEQ ID NOS:1-163 can be used to identify and characterize the temporal and tissue specific expression of a gene. These addressable arrays incorporate oligonucleotide sequences of sufficient length to confer the required specificity, yet be within the limitations of the production technology. The length of these probes is usually within a range of between about 8 to about 2000 nucleotides. Preferably the probes consist of 60 nucleotides, and more preferably 25 nucleotides, from the sequences first disclosed in SEQ ID NOS:1-163.

[0020] For example, a series of oligonucleotide sequences, or the complements thereof, can be used in chip format to represent all or a portion of the described nucleic acid sequences. The oligonucleotides, typically between about 16 to about 40 (or any whole number within the stated range) nucleotides in length, can partially overlap each other, and/or the sequence may be represented using oligonucleotides that do not overlap. Accordingly, the described polynucleotide sequences shall typically comprise at least about two or three distinct oligonucleotide sequences of at least about 8 nucleotides in length that are each first disclosed in the described Sequence Listing. Such oligonucleotide sequences can begin at any nucleotide present within a sequence in the Sequence Listing, and proceed in either a sense (5′-to-3′) orientation vis-a-vis the described sequence or in an antisense orientation.

[0021] Microarray-based analysis allows the discovery of broad patterns of genetic activity, providing new understanding of gene functions, and generating novel and unexpected insight into transcriptional processes and biological mechanisms. The use of addressable arrays comprising sequences first disclosed in SEQ ID NOS:1-163 provides detailed information about transcriptional changes involved in a specific pathway, potentially leading to the identification of novel components, or gene functions that manifest themselves as novel phenotypes.

[0022] Probes consisting of sequences first disclosed in SEQ ID NOS:1-163 can also be used in the identification, selection, and validation of novel molecular targets for drug discovery. The use of these unique sequences permits the direct confirmation of drug targets, and recognition of drug dependent changes in gene expression that are modulated through pathways distinct from the intended target of the drug. These unique sequences therefore also have utility in defining and monitoring both drug action and toxicity.

[0023] As an example of utility, the sequences first disclosed in SEQ ID NOS:1-163 can be utilized in microarrays, or other assay formats, to screen collections of genetic material from patients who have a particular medical condition. These investigations can also be carried out using the sequences first disclosed in SEQ ID NOS:1-163 in silico, and by comparing previously collected genetic databases and the disclosed sequences using computer software known to those in the art.

[0024] Thus the sequences first disclosed in SEQ ID NOS:1-163 can be used to identify mutations associated with a particular disease, and also in diagnostic or prognostic assays.

[0025] Although the presently described sequences have been specifically described using nucleotide sequence, it should be appreciated that each of the sequences can uniquely be described using any of a wide variety of additional structural attributes, or combinations thereof. For example, a given sequence can be described by the net composition of the nucleotides present within a given region of the sequence, in conjunction with the presence of one or more specific oligonucleotide sequence(s) first disclosed in SEQ ID NOS:1-163. Alternatively, a restriction map specifying the relative positions of restriction endonuclease digestion sites, or various palindromic or other specific oligonucleotide sequences, can be used to structurally describe a given sequence. Such restriction maps, which are typically generated by widely available computer programs (e.g., the University of Wisconsin GCG sequence analysis package, SEQUENCHER 3.0, Gene Codes Corp., etc.), can optionally be used in conjunction with one or more discrete nucleotide sequence(s) present in the sequence that can be described by the relative position of the sequence relative to one or more additional sequence(s) or one or more restriction sites present in the disclosed sequence.

[0026] For oligonucleotide probes, highly stringent conditions may refer, e.g., to washing in 6×SSC/0.05% sodium pyrophosphate at 37° C. (for 14-base oligonucleotides), 48° C. (for 17-base oligonucleotides), 55° C. (for 20-base oligonucleotides), and 60° C. (for 23-base oligonucleotides). These nucleic acid molecules may encode or act as antisense molecules, useful, for example, in membrane protein gene regulation and/or as antisense primers in amplification reactions of membrane protein nucleic acid sequences. With respect to membrane protein gene regulation, such techniques can be used to regulate biological functions. Further, such sequences may be used as part of ribozyme and/or triple helix sequences that are also useful for membrane protein gene regulation.

[0027] Inhibitory antisense or double stranded oligonucleotides can additionally comprise at least one modified base moiety that is selected from the group including, but not limited to, 5-fluorouracil, 5-bromouracil, 5-chlorouracil, 5-iodouracil, hypoxanthine, xanthine, 4-acetylcytosine, 5-(carboxyhydroxylmethyl) uracil, 5-carboxymethylaminomethyl-2-thiouridine, 5-carboxymethylaminomethyluracil, dihydrouracil, beta-D-galactosylqueosine, inosine, N6-isopentenyladenine, 1-methylguanine, 1-methylinosine, 2,2-dimethylguanine, 2-methyladenine, 2-methylguanine, 3-methylcytosine, 5-methylcytosine, N6-adenine, 7-methylguanine, 5-methylaminomethyluracil, 5-methoxyaminomethyl-2-thiouracil, beta-D-mannosylqueosine, 5′-methoxycarboxymethyluracil, 5-methoxyuracil, 2-methylthio-N-6-isopentenyladenine, uracil-5-oxyacetic acid (v), wybutoxosine, pseudouracil, queosine, 2-thiocytosine, 5-methyl-2-thiouracil, 2-thiouracil, 4-thiouracil, 5-methyluracil, uracil-5-oxyacetic acid methylester, 3-(3-amino-3-N2-carboxypropyl) uracil, (acp3)w, and 2,6-diaminopurine.

[0028] The antisense oligonucleotide can also comprise at least one modified sugar moiety selected from the group including, but not limited to, arabinose, 2-fluoroarabinose, xylulose, and hexose.

[0029] In yet another embodiment, the antisense oligonucleotide will comprise at least one modified phosphate backbone selected from the group including, but not limited to, a phosphorothioate, a phosphorodithioate, a phosphoramidothioate, a phosphoramidate, a phosphordiamidate, a methylphosphonate, an alkyl phosphotriester, and a formacetal or analog thereof.

[0030] In yet another embodiment, the antisense oligonucleotide is an α-anomeric oligonucleotide. An α-anomeric oligonucleotide forms specific double-stranded hybrids with complementary RNA in which, contrary to the usual 1-units, the strands run parallel to each other (Gautier et al., Nucl. Acids Res. 15:6625-6641, 1987). The oligonucleotide is a 2′-1-methylribonucleotide (Inoue et al., Nucl. Acids Res. 15:6131-6148, 1987), or a chimeric RNA-DNA analogue (Inoue et al., FEBS Lett. 215:327-330, 1987). Alternatively, double stranded RNA can be used to disrupt the expression and function of a targeted membrane protein.

[0031] Oligonucleotides of the invention can be synthesized by standard methods known in the art, e.g., by use of an automated DNA synthesizer (such as are commercially available from Biosearch, Applied Biosystems, etc.). As examples, phosphorothioate oligonucleotides can be synthesized (Stein et al., Nucl. Acids Res. 16:3209-3221, 1988), and methylphosphonate oligonucleotides can be prepared by use of controlled pore glass polymer supports (Sarin et al., Proc. Natl. Acad. Sci. USA 85:7448-7451, 1988), etc.

[0032] Low stringency conditions are well-known to those of skill in the art, and will vary predictably depending on the specific organisms from which the library and the labeled sequences are derived. For guidance regarding such conditions, see, for example, “Molecular Cloning, A Laboratory Manual” (Sambrook et al., eds., Cold Spring Harbor Press, Cold Spring Harbor, N.Y., 1989), “Current Protocols in Molecular Biology”, supra, and periodic updates thereof.

[0033] Alternatively, suitably labeled membrane protein nucleotide probes can be used to screen a human genomic library using appropriately stringent conditions or by PCR. The identification and characterization of human genomic clones is helpful for identifying polymorphisms (including, but not limited to, nucleotide repeats, microsatellite alleles, single nucleotide polymorphisms, or coding single nucleotide polymorphisms), determining the genomic structure of a given locus/allele, and designing diagnostic tests. For example, sequences derived from regions adjacent to the intron/exon boundaries of the human gene can be used to design primers for use in amplification assays to detect mutations within the exons, introns, splice sites (e.g., splice acceptor and/or donor sites), etc., that can be used in diagnostics and pharmacogenomics.

[0034] For example, the present sequences can be used in restriction fragment length polymorphism (RFLP) analysis to identify specific individuals. In this technique, an individual's genomic DNA is digested with one or more restriction enzymes, and probed on a Southern blot to yield unique bands for identification (as generally described in U.S. Pat. No. 5,272,057). In addition, the sequences of the present invention can be used to provide polynucleotide reagents, e.g., PCR primers, targeted to specific loci in the human genome, which can enhance the reliability of DNA-based forensic identifications by, for example, providing another “identification marker” (i.e., another DNA sequence that is unique to a particular individual). Actual base sequence information can be used for identification as an accurate alternative to patterns formed by restriction enzyme generated fragments.

[0035] Further, a membrane protein gene homolog can be isolated from nucleic acid from an organism of interest by performing PCR using two degenerate or “wobble” oligonucleotide primer pools designed on the basis of amino acid sequences within the membrane protein products disclosed herein. The template for the reaction may be genomic DNA, or total RNA, mRNA, and/or cDNA obtained by reverse transcription of mRNA prepared from human or non-human cell lines or tissue known to express, or suspected of expressing, an allele of a membrane protein gene. The PCR product can be subcloned and sequenced to ensure that the amplified sequences represent the sequence of the desired membrane protein gene. The PCR fragment can then be used to isolate a full length cDNA clone by a variety of methods. For example, the amplified fragment can be labeled and used to screen a cDNA library, such as a bacteriophage cDNA library. Alternatively, the labeled fragment can be used to isolate genomic clones via the screening of a genomic library.

[0036] PCR technology can also be used to isolate full length cDNA sequences. For example, RNA can be isolated, following standard procedures, from an appropriate cellular or tissue source (i.e., one known to express, or suspected of expressing, a membrane protein gene). A reverse transcription (RT) reaction can be performed on the RNA using an oligonucleotide primer specific for the most 5′ end of the amplified fragment for the priming of first strand synthesis. The resulting RNA/DNA hybrid may then be “tailed” using a standard terminal transferase reaction, the hybrid may be digested with RNase H, and second strand synthesis may then be primed with a complementary primer. Thus, cDNA sequences upstream of the amplified fragment can be isolated. For a review of cloning strategies that can be used, see, e.g., “Molecular Cloning, A Laboratory Manual”, supra.

[0037] A cDNA encoding a mutant membrane protein sequence can be isolated, for example, by using PCR. In this case, the first cDNA strand may be synthesized by hybridizing an oligo-dT oligonucleotide to mRNA isolated from tissue known to express, or suspected of expressing, a normal version of the membrane protein, in an individual putatively carrying a mutant membrane protein allele, and by extending the new strand with reverse transcriptase. The second strand of the cDNA is then synthesized using an oligonucleotide that hybridizes specifically to the 5′ end of the normal sequence. Using these two primers, the product is then amplified via PCR, optionally cloned into a suitable vector, and subjected to DNA sequence analysis through methods well-known to those of skill in the art. By comparing the DNA sequence of the mutant membrane protein allele to that of a corresponding normal membrane protein allele, the mutation(s) responsible for the loss or alteration of function of the mutant membrane protein gene product can be ascertained.

[0038] Alternatively, a genomic library can be constructed using DNA obtained from an individual suspected of carrying, or known to carry, a mutant membrane protein allele (e.g., a person manifesting a membrane protein-associated phenotype such as, for example, osteoporosis, behavioral disorders, depression, colitis or spastic colon, obesity, high or low blood pressure, connective tissue disorders, hyperthyroidism or hypothyroidism, paralysis or palsy, nerve damage or degeneration, an inflammatory disorder, vision disorders, infertility, etc.), or a cDNA library can be constructed using RNA from a tissue known to express, or suspected of expressing, a mutant membrane protein allele. A normal membrane protein gene, or any suitable fragment thereof, can then be labeled and used as a probe to identify the corresponding mutant membrane protein allele in such libraries. Clones containing mutant membrane protein sequences can then be purified and subjected to sequence analysis according to methods well-known to those skilled in the art.

[0039] Additionally, an expression library can be constructed utilizing cDNA synthesized from, for example, RNA isolated from a tissue known to express, or suspected of expressing, a mutant membrane protein allele in an individual suspected of carrying, or known to carry, such a mutant allele. In this manner, gene products made by the putatively mutant tissue can be expressed and screened using standard antibody screening techniques in conjunction with antibodies raised against a normal membrane protein product, as described below (for screening techniques, see, for example, “Antibodies: A Laboratory Manual” (Harlow and Lane, eds., Cold Spring Harbor Press, Cold Spring Harbor, N.Y., 1988)).

[0040] Additionally, screening can be accomplished by screening with labeled membrane protein fusion proteins, such as, for example, alkaline phosphatase-membrane protein or membrane protein-alkaline phosphatase fusion proteins. In cases where a membrane protein mutation results in an expression product with altered function (e.g., as a result of a missense or a frameshift mutation), polyclonal antibodies to a membrane protein are likely to cross-react with a corresponding mutant membrane protein expression product. Library clones detected via their reaction with such labeled antibodies can be purified and subjected to sequence analysis according to methods well-known in the art.

[0041] The invention also encompasses: (a) DNA vectors that contain any of the foregoing membrane protein coding sequences and/or their complements (i.e., antisense); (b) DNA expression vectors that contain any of the foregoing membrane protein coding sequences operatively associated with a regulatory element that directs the expression of the coding sequences (for example, baculovirus as described in U.S. Pat. No. 5,869,336); (c) genetically engineered host cells that contain any of the foregoing membrane protein coding sequences operatively associated with a regulatory element that directs the expression of the coding sequences in the host cell; and (d) genetically engineered host cells that express an endogenous membrane protein sequence under the control of an exogenously introduced regulatory element (i.e., gene activation). As used herein, regulatory elements include, but are not limited to, inducible and non-inducible promoters, enhancers, operators, and other elements known to those skilled in the art that drive and regulate expression. Such regulatory elements include, but are not limited to, the cytomegalovirus (hCMV) immediate early gene, regulatable, viral elements (particularly retroviral LTR promoters), the early or late promoters of SV40 or adenovirus, the lac system, the trp system, the TAC system, the TRC system, the major operator and promoter regions of phage lambda, the control regions of fd coat protein, the promoter for 3-phosphoglycerate kinase (PGK), the promoters of acid phosphatase, and the promoters of the yeast α-mating factors.

[0042] The present invention also encompasses antibodies and anti-idiotypic antibodies (including Fab fragments), antagonists and agonists of a membrane protein, as well as compounds or nucleotide constructs that inhibit expression of a membrane protein sequence (transcription factor inhibitors, antisense and ribozyme molecules, or open reading frame sequence or regulatory sequence replacement constructs), or promote the expression of a membrane protein (e.g., expression constructs in which membrane protein coding sequences are operatively associated with expression control elements such as promoters, promoter/enhancers, etc.).

[0043] The membrane proteins, polypeptides, peptides, fusion proteins, nucleotide sequences, antibodies, antagonists and agonists can be useful for the detection of mutant membrane proteins, or inappropriately expressed membrane proteins, for the diagnosis of disease. The membrane proteins, peptides, fusion proteins, nucleotide sequences, host cell expression systems, antibodies, antagonists, agonists, and genetically engineered cells and animals can be used for screening for drugs (or high throughput screening of combinatorial libraries) effective in the treatment of the symptomatic or phenotypic manifestations of perturbing the normal function of a membrane protein in the body. The use of engineered host cells and/or animals may offer an advantage in that such systems allow not only for the identification of compounds that bind to the endogenous receptor for a membrane protein, but can also identify compounds that trigger membrane protein-mediated activities or pathways.

[0044] Finally, the described membrane protein products can be used as therapeutics. For example, soluble derivatives such as membrane protein peptides/domains, membrane protein fusion protein products (especially Ig fusion proteins, i.e., fusions of a membrane protein, or a domain of a membrane protein, to an IgFc), membrane protein antibodies and anti-idiotypic antibodies (including Fab fragments), antagonists or agonists (including compounds that modulate or act on downstream targets in a membrane protein-mediated pathway) can be used to directly treat diseases, including infectious diseases, or disorders. For instance, the administration of an effective amount of a soluble membrane protein product, a membrane protein-IgFc fusion protein, or an anti-idiotypic antibody (or its Fab) that mimics the membrane protein, could activate or effectively antagonize the endogenous membrane protein receptor. Nucleotide constructs encoding such membrane protein products can be used to genetically engineer host cells to express such products in vivo; these genetically engineered cells function as “bioreactors” in the body, delivering a continuous supply of a membrane protein, peptide, or fusion protein to the body. Nucleotide constructs encoding functional membrane proteins, mutant membrane proteins, as well as antisense and ribozyme molecules, can also be used in “gene therapy” approaches for the modulation of membrane protein expression. Thus, the invention also encompasses pharmaceutical formulations and methods for treating biological disorders.

[0045] Various aspects of the invention are described in greater detail in the subsections below.

### 7.1 Membrane Protein Nucleic Acid Sequences

[0046] The cDNA sequences and the corresponding deduced amino acid sequences of the described membrane proteins are presented in the Sequence Listing. The membrane protein nucleotide sequences were obtained from: gene trapped cDNAs, genomic sequence, and clones isolated from human brain, adipose, testis, and placenta cDNA libraries (SEQ ID NOS:1-7); clustered human gene trapped sequences, ESTs, and cDNA isolated from a human placenta cDNA cell library (SEQ ID NOS:8-12); analyzing human gene trapped sequence tags (SEQ ID NOS:13 and 14); analyzing human gene trapped sequence tags and cDNA clones isolated from a human kidney cDNA library (SEQ ID NOS:15-17); clustered human gene trapped sequences, genomic sequence, ESTs, and cDNAs from a human muscle cDNA library (SEQ ID NOS:18-45); clustered human gene trapped sequences, and cDNA products isolated from human brain and kidney mRNA (SEQ ID NOS:46-62); clustered human gene trapped sequences, and cDNA products isolated from human fetal brain and kidney libraries (SEQ ID NOS:63-95); clustered human gene trapped sequences, and cDNA products isolated from human skeletal muscle, colon, small intestine, fetal kidney, fetus, fetal brain, fetal lung, and mammary gland mRNAs (SEQ ID NOS:96-108); clustered genomic sequence, ESTs, and cDNAs produced using lung and testis mRNAs (SEQ ID NOS:109-112); clustered genomic sequence, ESTs, and cDNAs produced using human prostate, pituitary, skeletal muscle, fetal brain, brain, adrenal gland mRNAs (SEQ ID NOS:113-116); clustered genomic sequence, ESTs, and cDNAs produced using fetal kidney, kidney, and spinal cord mRNAs (SEQ ID NOS:117 and 118); clustered genomic sequence, ESTs, and cDNAs produced using fetal brain, fetal kidney, embryos, and embryonic carcinoma mRNAs (SEQ ID NOS:119-121); clustered genomic sequence, ESTs, and cDNAs produced using lymph node, hypothalamus, adrenal gland, lymph node, fetal kidney, adrenal gland, fetus, thyroid, uterus, and lung mRNAs (SEQ ID NOS:122-125); clustered genomic sequence, gene trapped sequences, ESTs, and cDNAs produced using placenta and brain mRNAs (SEQ ID NOS:126 and 127); cDNAs produced using lymph node and adrenal gland mRNAs (SEQ ID NOS:128 and 129); clustered genomic sequence, gene trapped sequences, ESTs, and cDNAs produced using fetal brain, fetal lung, pericardium, adrenal gland, lymph node, fetus, spinal cord, small intestine, mammary, colon, fetal kidney, lung, thyroid, prostate, and cerebellum mRNAs (SEQ ID NOS:130-132); clustered genomic sequence, gene trapped sequences, ESTs, and cDNAs produced using brain, cerebellum, hypothalamus, and kidney mRNAs (SEQ ID NOS:133 and 134); clustered genomic sequence, gene trapped sequences, ESTs, and cDNAs produced using adrenal gland, cerebellum, hypothalamus, fetal brain, brain and thyroid mRNAs (SEQ ID NOS:135 and 136); genomic sequence, and cDNA products isolated from human fetal brain, testis, and skeletal muscle mRNAs (SEQ ID NOS:137-148); clustered genomic sequence, gene trapped sequences, ESTs, and cDNAs produced from bone marrow and lymph node mRNAs (SEQ ID NOS:149-153); clustered genomic sequence, gene trapped sequences, ESTs, and cDNAs produced from bone marrow mRNAs (SEQ ID NOS:154-156); clustered ESTs, genomic sequence, and cDNAs generated from human lymph node, brain, spinal cord, and mammary gland mRNAs (SEQ ID NOS:157 and 158); and human genomic sequence and cDNAs made from human brain, adrenal gland, prostate, adipose, and testis mRNAs (SEQ ID NOS:159-163). The mRNAs and cDNA libraries were purchased from Clontech (Palo Alto, Calif.) and/or Edge Biosystems (Gaithersburg, Md.). Sequences corresponding to portions of certain of the presently described sequences have been described, and it is possible that such sequences were incomplete sequences that had been erroneously characterized as “full length”.

[0047] The genes encoding the described membrane proteins are located on: human chromosome 15, see GenBank Accession Numbers AC018900 and AK021660 (SEQ ID NOS:96-108); one or more of human chromosomes 10 and 11, see GenBank Accession Numbers AC084775 and AP002515 (SEQ ID NOS:109-112); human chromosome 5, see GenBank Accession Number AC026800 (SEQ ID NOS:113-116); human chromosome 9, see GenBank Accession Number AL445-489 (SEQ ID NOS:117 and 118); the human X chromosome, see GenBank Accession Number AB037734 (SEQ ID NOS:119-121); human chromosome 6, see GenBank Accession Number AL049553 (SEQ ID NOS:122-125); human chromosome 15, see GenBank Accession Number AC068507, which maps near a region associated with the autosomal recessive disorder Bardet-Biedl syndrome (SEQ ID NOS:126 and 127); human chromosome 3, see GenBank Accession Number AC024886 (SEQ ID NOS:128 and 129); human chromosome 4, see GenBank Accession Number AC027518 (SEQ ID NOS:130-132); human chromosome 15, see GenBank Accession Number AC022302(SEQ ID NOS:133 and 134); human chromosome 19, see GenBank Accession Number AC008761 (SEQ ID NOS:135 and 136); human chromosome 1, see GenBank Accession Number AL391234 (SEQ ID NOS:137-148); human chromosome 1, see GenBank Accession Number AL356276 (SEQ ID NOS:149-153); human chromosome 1, see GenBank Accession Number AL359970 (SEQ ID NOS:154-156); human chromosome 11, see GenBank Accession Number AP003501 (SEQ ID NOS:157 and 158); and human chromosome 1, see GenBank Accession Number AL121980 (SEQ ID NOS:159-163). As such, the described sequences can also be used to map the coding regions of the human genome, and to verify/identify mRNA exon splice junctions.

[0048] A variety polymorphisms were identified in the disclosed sequences, including: a translationally silent (“silent”) A/G polymorphism at nucleotide (“nt”) position 2106 of SEQ ID NO:8, and nt position 1827 of SEQ ID NO:10 (denoted by an “r” in the Sequence Listing), both of which result in a glutamine residue at corresponding amino acid (“aa”) position 702 of SEQ ID NO:9, and aa position 609 of SEQ ID NO:11, respectively; an A/C polymorphism at nt position 124 of SEQ ID NO:13 (denoted by an “m” in the Sequence Listing), which can result in an arginine or serine residue at corresponding aa position 42 of SEQ ID NO:14; a C/T polymorphism at nt position 233 of SEQ ID NO:13 (denoted by a “y” in the Sequence Listing), which can result in a threonine or methionine residue at corresponding aa position 78 of SEQ ID NO:14; a silent T/C polymorphism at nt position 1647 of SEQ ID NOS:18, 28, and 30, and nt position 822 of SEQ ID NOS:32, 42, and 44 (denoted by a “y” in the Sequence Listing), both of which result in a serine residue at corresponding aa position 549 of SEQ ID NOS:19, 29, and 31, and aa position 274 of SEQ ID NOS:33, 43, and 45, respectively; a G/C polymorphism at nt position 1884 of SEQ ID NOS:18 and 30, and nt position 1059 of SEQ ID NOS:32 and 44 (denoted by an “s” in the Sequence Listing), which can result in a leucine or phenylalanine residue at corresponding aa position 628 of SEQ ID NOS:19 and 31, and aa position 353 of SEQ ID NOS:33 and 45, respectively; an A/G polymorphism at nt position 2072 of SEQ ID NOS:18 and 30, and nt position 1247 of SEQ ID NOS:32 and 44 (denoted by an “r” in the Sequence Listing), which can result in a serine or asparagine residue at corresponding aa position 691 of SEQ ID NOS:19 and 31, and aa position 416 of SEQ ID NOS:33 and 45, respectively; an A/G polymorphism at nt position 2120 of SEQ ID NOS:18 and 30, and nt position 1295 of SEQ ID NOS:32 and 44 (denoted by an “r” in the Sequence Listing), which can result in an asparagine or serine residue at corresponding aa position 707 of SEQ ID NOS:19 and 31, and aa position 432 of SEQ ID NOS:33 and 45, respectively; a silent A/G polymorphism at nt position 2376 of SEQ ID NO:18, and nt position 1551 of SEQ ID NO:32 (denoted by an “r” in the Sequence Listing), both of which result in a proline residue at corresponding aa position 792 of SEQ ID NO:19, and aa position 517 of SEQ ID NO:33, respectively; an A/G polymorphism at nt position 2540 of SEQ ID NO:18, and nt position 1715 of SEQ ID NO:32 (denoted by an “r” in the Sequence Listing), which can result in a glutamate or glycine residue at corresponding aa position 847 of SEQ ID NO:19, and aa position 572 of SEQ ID NO:33, respectively; an A/G polymorphism at nt position 100 of SEQ ID NOS:46 and 50, nt position 232 of SEQ ID NOS:48 and 52, and nt position 406 of SEQ ID NOS:54 and 56 (denoted by an “r” in the sequence Listing), which can result in an asparagine or aspartate residue at corresponding aa position 34 of SEQ ID NOS:47 and 51, aa position 78 of SEQ ID NOS:49 and 53, and aa position 136 of SEQ ID NOS:55 and 57, respectively; a silent A/G polymorphism at nt position 792 of SEQ ID NOS:46 and 50, nt position 924 of SEQ ID NOS:48 and 52, nt position 1098 of SEQ ID NOS:54 and 56, and nt position 507 of SEQ ID NOS:58 and 60 (denoted by an “r” in the sequence Listing), both of which result in a proline residue at corresponding aa position 264 of SEQ ID NOS:47 and 51, aa position 308 of SEQ ID NOS:49 and 53, aa position 366 of SEQ ID NOS:55 and 57, and aa position 169 of SEQ ID NOS:59 and 61, respectively; a silent T/C polymorphism at nt position 840 of SEQ ID NOS:46 and 50, nt position 972 of SEQ ID NOS:48 and 52, nt position 1146 of SEQ ID NOS:54 and 56, and nt position 555 of SEQ ID NOS:58 and 60 (denoted by a “y” in the sequence Listing), both of which result in an isoleucine residue at corresponding aa position 280 of SEQ ID NOS:47 and 51, aa position 324 of SEQ ID NOS:49 and 53, aa position 382 of SEQ ID NOS:55 and 57, and aa position 185 of SEQ ID NOS:59 and 61, respectively; a GTG/null polymorphism at nt position 1974 of SEQ ID NOS:46 and 50, nt position 2106 of SEQ ID NOS:48 and 52, nt position 2280 of SEQ ID NOS:54 and 56, and nt position 1689 of SEQ ID NOS:58 and 60, which can result in a valine residue or no amino acid at corresponding aa position 658 of SEQ ID NOS:47 and 51, aa position 702 of SEQ ID NOS:49 and 53, aa position 760 of SEQ ID NOS:55 and 57, and aa position 563 of SEQ ID NOS:59 and 61, respectively; a silent C/T polymorphism at nt position 804 of SEQ ID NOS:65, 67, 69, 71, 73, 75, and 77, and nt position 507 of SEQ ID NOS:81, 83, 85, 87, 89, 91, and 93 (denoted by a “y” in the Sequence Listing), both of which result in an arginine residue at corresponding aa position 268 of SEQ ID NOS:66, 68, 70, 72, 74, 76, and 78, and aa position 169 of SEQ ID NOS:82, 84, 86, 88, 90, 92, and 94, respectively; a T/C polymorphism at nt position 2075 of SEQ ID NOS:71 and 75, nt position 2060 of SEQ ID NOS:73 and 77, nt position 1778 of SEQ ID NOS:87 and 91, and nt position 1763 of SEQ ID NOS:89 and 93 (denoted by a “y” in the Sequence Listing), which can give rise to a leucine or proline residue at corresponding aa position 692 of SEQ ID NOS:72 and 76, aa position 687 of SEQ ID NOS:74 and 78, aa position 593 of SEQ ID NOS:88 and 92, and aa position 588 of SEQ ID NOS:90 and 94, respectively; a T/A polymorphism at nt position 1108 of SEQ ID NOS:96, 98, and 100, and nt position 1069 of SEQ ID NOS:102, 104, and 106, which can result in a cysteine or serine residue at corresponding aa position 370 of SEQ ID NOS:97, 99, and 101, and aa position 357 of SEQ ID NOS:103, 105, and 107, respectively; a G/A polymorphism at nt position 1433 of SEQ ID NOS:96 and 98, and nt position 1394 of SEQ ID NOS:102 and 104, which can result in a serine or asparagine residue at corresponding aa position 478 of SEQ ID NOS:97 and 99, and aa position 465 of SEQ ID NOS:103 and 105, respectively; an A/G polymorphism at nt position 2366 of SEQ ID NO:96, nt position 2141 of SEQ ID NO:98, nt position 2327 of SEQ ID NO:102, and nt position 2102 of SEQ ID NO:104, which can result in a lysine or arginine residue at corresponding aa position 789 of SEQ ID NO:97, aa position 714 of SEQ ID NO:99, aa position 776 of SEQ ID NO:103, and aa position 701 of SEQ ID NO:105, respectively; a C/G polymorphism at nt position 241 of SEQ ID NOS:109 and 111, which can result in an arginine or glycine residue at corresponding aa position 81 of SEQ ID NOS:110 and 112; a C/G polymorphism at nt position 940 of SEQ ID NOS:109 and 111, which can result in a proline or alanine residue at corresponding aa position 314 of SEQ ID NOS:110 and 112; a silent C/T polymorphism at nt position 3465 of SEQ ID NOS:109 and 111, both of which result in an aspartate residue at corresponding aa position 1155 of SEQ ID NOS:110 and 112; a silent C/T polymorphism at nt position 5190 of SEQ ID NO:109, both of which result in a glycine residue at corresponding aa position 1730 of SEQ ID NO:110; an A/G polymorphism at nt position 1601 of SEQ ID NOS:113 and 115, which can result in a tyrosine or cysteine residue at corresponding aa position 534 of SEQ ID NOS:114 and 116; a T/G polymorphism at nt position 1704 of SEQ ID NOS:113 and 115, which can result in a cysteine or tryptophan residue at corresponding aa position 568 of SEQ ID NOS:114 and 116; a G/T polymorphism at nt position 1709 of SEQ ID NOS:113 and 115, which can result in a serine or isoleucine residue at corresponding aa position 600 of SEQ ID NOS:114 and 116; a T/G polymorphism at nt position 1712 of SEQ ID NOS:113 and 115, which can result in a valine or glycine residue at corresponding aa position 601 of SEQ ID NOS:114 and 116; a G/C polymorphism at nt position 631 of SEQ ID NO:117, which can result in an alanine or proline residue at corresponding aa position 211 of SEQ ID NO:118; a C/T polymorphism at nt position 2126 of SEQ ID NO:117, which can result in an alanine or valine residue at corresponding aa position 709 of SEQ ID NO:118; a G/A polymorphism at nt position 2422 of SEQ ID NO:117, which can result in a glutamate or lysine residue at corresponding aa position 808 of SEQ ID NO:118; a C/A polymorphism at nt position 2427 of SEQ ID NO:117, which can result in a glutamate or aspartate residue at corresponding aa position 809 of SEQ ID NO:118; a G/A polymorphism at nt position 2905 of SEQ ID NO:117, which can result in an alanine or threonine residue at corresponding aa position 969 of SEQ ID NO:118; a C/G polymorphism at nt position 2985 of SEQ ID NO:117, which can result in a phenylalanine or leucine residue at corresponding aa position 995 of SEQ ID NO:118; a T/C polymorphism at nt position 3329 of SEQ ID NO:117, which can result in a methionine or threonine residue at corresponding aa position 1110 of SEQ ID NO:118; a silent G/A polymorphism at nt position 489 of SEQ ID NO:122 (denoted by an “r” in the Sequence Listing), both of which result in a proline residue at corresponding aa position 163 of SEQ ID NO:123; a silent G/C polymorphism at nt position 1497 of SEQ ID NO:122 (denoted by an “s” in the Sequence Listing), both of which result in a leucine residue at corresponding aa position 499 of SEQ ID NO:123; a silent T/C polymorphism at nt position 345 of SEQ ID NO:128 (denoted by a “y” in the Sequence Listing), both of which result in an asparagine residue at corresponding aa position 115 of SEQ ID NO:129; a G/T polymorphism at nt position 448 of SEQ ID NO:128 (denoted by a “k” in the Sequence Listing), which can result in an aspartate or tyrosine residue at corresponding aa position 150 of SEQ ID NO:129; a silent G/A polymorphism at nt position 1347 of SEQ ID NO:128 (denoted by an “r” in the Sequence Listing), both of which result in a glutamine residue at corresponding aa position 449 of SEQ ID NO:129; a silent G/A polymorphism at nt position 2091 of SEQ ID NO:128 (denoted by an “r” in the Sequence Listing), both of which result in a glutamine residue at corresponding aa position 697 of SEQ ID NO:129; a silent T/C polymorphism at nt position 6729 of SEQ ID NO:128 (denoted by a “y” in the Sequence Listing), both of which result in an asparagine residue at corresponding aa position 2243 of SEQ ID NO:129; a silent G/A polymorphism at nt position 7683 of SEQ ID NO:128 (denoted by an “r” in the Sequence Listing), both of which result in a threonine residue at corresponding aa position 2561 of SEQ ID NO:129; a silent C/T polymorphism at nt position 405 of SEQ ID NO:130, both of which result in a phenylalanine residue at corresponding aa position 135 of SEQ ID NO:131; an A/T polymorphism at nt position 1358 of SEQ ID NO:130, which can result in a glutamine or leucine residue at corresponding aa position 453 of SEQ ID NO:131; a silent T/C polymorphism at nt position 2142 of SEQ ID NO:130, both of which result in a threonine residue at corresponding aa position 714 of SEQ ID NO:131; an A/G polymorphism at nt position 2267 of SEQ ID NO:130, which can result in a lysine or arginine residue at corresponding aa position 756 of SEQ ID NO:131; a silent T/A polymorphism at nt position 3429 of SEQ ID NO:130, both of which result in a leucine residue at corresponding aa position 1143 of SEQ ID NO:131; an A/G polymorphism at nt position 3628 of SEQ ID NO:130, which can result in a threonine or alanine residue at corresponding aa position 1210 of SEQ ID NO:131; a silent C/G polymorphism at nt position 4296 of SEQ ID NO:130, both of which result in a valine residue at corresponding aa position 1432 of SEQ ID NO:131; a silent A/G polymorphism at nt position 5799 of SEQ ID NO:130, both of which result in a proline residue at corresponding aa position 1933 of SEQ ID NO:131; an A/C polymorphism at nt position 6775 of SEQ ID NO:130, which can result in a threonine or proline residue at corresponding aa position 2259 of SEQ ID NO:131; a silent C/T polymorphism at nt position 6819 of SEQ ID NO:130, both of which result in an isoleucine residue at corresponding aa position 2273 of SEQ ID NO:131; a T/C polymorphism at nt position 7685 of SEQ ID NO:130, which can result in an isoleucine or threonine residue at corresponding aa position 2562 of SEQ ID NO:131; an A/G polymorphism at nt position 7960 of SEQ ID NO:130, which can result in an isoleucine or valine residue at corresponding aa position 2654 of SEQ ID NO:131; a C/G polymorphism at nt position 7981 of SEQ ID NO:130, which can result in a valine or leucine residue at corresponding aa position 2661 of SEQ ID NO:131; an A/G polymorphism at nt position 7991 of SEQ ID NO:130, which can result in a glutamate or glycine residue at corresponding aa position 2664 of SEQ ID NO:131; an A/G polymorphism at nt position 8213 of SEQ ID NO:130, which can result in an asparagine or serine residue at corresponding aa position 2738 of SEQ ID NO:131; a T/A polymorphism at nt position 11007 of SEQ ID NO:130, which can result in a serine or arginine residue at corresponding aa position 3669 of SEQ ID NO:131; a silent C/T polymorphism at nt position 11010 of SEQ ID NO:130, both of which result in an isoleucine residue at corresponding aa position 3670 of SEQ ID NO:131; a G/T polymorphism at nt position 11012 of SEQ ID NO:130, which can result in a cysteine or phenylalanine residue at corresponding aa position 3671 of SEQ ID NO:131; a silent G/A polymorphism at nt position 11193 of SEQ ID NO:130, both of which result in an arginine residue at corresponding aa position 3731 of SEQ ID NO:131; a C/T polymorphism at nt position 11197 of SEQ ID NO:130, which can result in a proline or cysteine residue at corresponding aa position 3733 of SEQ ID NO:131; an A/C polymorphism at nt position 11389 of SEQ ID NO:130, which can result in an asparagine or histidine residue at corresponding aa position 3797 of SEQ ID NO:131; a TT/CC polymorphism at nt positions 11399-11400 of SEQ ID NO:130, which can result in an asparagine or isoleucine residue at corresponding aa position 3800 of SEQ ID NO:131; a T/G polymorphism at nt position 11443 of SEQ ID NO:130, which can result in a leucine or valine residue at corresponding aa position 3814 of SEQ ID NO:131; a C/T polymorphism at nt position 11509 of SEQ ID NO:130, which can result in a proline or serine residue at corresponding aa position 3837 of SEQ ID NO:131; a C/T polymorphism at nt position 3235 of SEQ ID NO:133 (denoted by a “y” in the Sequence Listing), which can result in a histidine or tyrosine residue at corresponding aa position 1079 of SEQ ID NO:134; an A/T polymorphism at nt position 1075 of SEQ ID NO:135, which can result in an alanine or threonine residue at corresponding aa position 359 of SEQ ID NO:136; a G/A polymorphism at nt position 176 of SEQ ID NOS:137 and 139, nt position 14 of SEQ ID NOS:141 and 143, and nt position 59 of SEQ ID NOS:145 and 147, which can result in an arginine or glutamine residue at corresponding aa position 59 of SEQ ID NOS:138 and 140, aa position 5 of SEQ ID NOS:142 and 144, and aa position 20 of SEQ ID NOS:146 and 148, respectively; a G/A polymorphism at nt position 977 of SEQ ID NOS:137 and 139, nt position 815 of SEQ ID NOS:141 and 143, and nt position 860 of SEQ ID NOS:145 and 147, which can result in a glycine or glutamate residue at corresponding aa position 326 of SEQ ID NOS:138 and 140, aa position 272 of SEQ ID NOS:142 and 144, and aa position 287 of SEQ ID NOS:146 and 148, respectively; a C/A polymorphism at nt position 5598 of SEQ ID NO:137, nt position 5403 of SEQ ID NO:139, nt position 5436 of SEQ ID NO:141, nt position 5241 of SEQ ID NO:143, nt position 5481 of SEQ ID NO:145, and nt position 5286 of SEQ ID NO:147, which can result in a phenylalanine or leucine residue at corresponding aa position 1866 of SEQ ID NO:138, aa position 1801 of SEQ ID NO:140, aa position 1812 of SEQ ID NO:142, aa position 1747 of SEQ ID NO:144, aa position 1827 of SEQ ID NO:146, and aa position 1762 of SEQ ID NO:148, respectively; an A/G polymorphism at nt position 82 of SEQ ID NOS:149 and 151, which can result in an asparagine or aspartate residue at corresponding aa position 28 of SEQ ID NOS:150 and 152; a C/G polymorphism at nt position 210 of SEQ ID NOS:149 and 151, which can result in an aspartate or glutamate residue at corresponding aa position 70 of SEQ ID NOS:150 and 152; a C/A polymorphism at nt position 263 of SEQ ID NOS:149 and 151, which can result in a serine or tyrosine residue at corresponding aa position 88 of SEQ ID NOS:150 and 152; an A/G polymorphism at nt position 379 of SEQ ID NOS:149 and 151, which can result in an asparagine or aspartate at corresponding aa position 127 of SEQ ID NOS:150 and 152; a silent A/G polymorphism at nt position 390 of SEQ ID NOS:149 and 151, both of which result in a glutamine residue at corresponding aa position 130 of SEQ ID NOS:150 and 152; a silent T/C polymorphism at nt position 432 of SEQ ID NOS:149 and 151, both of which result in a tyrosine residue at corresponding aa position 144 of SEQ ID NOS:150 and 152; a C/A polymorphism at nt position 574 of SEQ ID NO:149, which can result in a proline or threonine residue at corresponding aa position 192 of SEQ ID NO:150; a silent C/T polymorphism at nt position 741 of SEQ ID NO:149, both of which result in an isoleucine residue at corresponding aa position 247 of SEQ ID NO:150; an A/T polymorphism at nt position 790 of SEQ ID NO:149, which can result in a threonine or serine residue at corresponding aa position 264 of SEQ ID NO:150; an A/G polymorphism at nt position 800 of SEQ ID NO:149, which can result in a histidine or arginine residue at corresponding aa position 267 of SEQ ID NO:150; a G/A polymorphism at nt position 886 of SEQ ID NO:149, which can result in a glycine or arginine residue at corresponding aa position 296 of SEQ ID NO:150; a CTG- or -GTC- or -GTG polymorphism at nt positions 895-897 of SEQ ID NO:149, which can result in a leucine or valine residue at corresponding aa position 299 of SEQ ID NO:150; an A/G polymorphism at nt position 968 of SEQ ID NO:149, which can result in a histidine or arginine at corresponding aa position 323 of SEQ ID NO:150; a silent A/C polymorphism at nt position 984 of SEQ ID NO:149, both of which result in a valine residue at corresponding aa position 328 of SEQ ID NO:150; a G/T polymorphism at nt position 994 of SEQ ID NO:149, which can result in a glycine or cysteine residue at corresponding aa position 332 of SEQ ID NO:150; a G/C polymorphism at nt position 998 of SEQ ID NO:149, which can result in an arginine or threonine residue at corresponding aa position 333 of SEQ ID NO:150; a silent G/A polymorphism at nt position 1047 of SEQ ID NO:149, both of which result in a lysine residue at corresponding aa position 349 of SEQ ID NO:150; a G/T polymorphism at nt position 1050 of SEQ ID NO:149, which can result in a glutamate or aspartate residue at corresponding aa position 350 of SEQ ID NO:150; an A/T polymorphism at nt position 1091 of SEQ ID NO:149, which can result in a histidine or leucine residue at corresponding aa position 364 of SEQ ID NO:150; a C/G polymorphism at nt position 1157 of SEQ ID NO:149, which can result in a threonine or serine residue at corresponding aa position 386 of SEQ ID NO:150; a silent C/G polymorphism at nt position 1218 of SEQ ID NO:149, both of which result in a serine residue at corresponding aa position 406 of SEQ ID NO:150; a G/T polymorphism at nt position 1260 of SEQ ID NO:149, which can result in a glutamate or aspartate residue at corresponding aa position 420 of SEQ ID NO:150; a G/T polymorphism at nt position 1285 of SEQ ID NO:149, which can result in an alanine or serine at corresponding aa position 429 of SEQ ID NO:150; an A/G polymorphism at nt position 1313 of SEQ ID NO:149, which can result in an asparagine or serine residue at corresponding aa position 438 of SEQ ID NO:150; a silent A/C polymorphism at nt position 1341 of SEQ ID NO:149, both of which result in a glycine residue at corresponding aa position 447 of SEQ ID NO:150; a silent T/C polymorphism at nt position 1509 of SEQ ID NO:149, both of which result in a serine residue at corresponding aa position 503 of SEQ ID NO:150; a CC/TT polymorphism at nt positions 1510-1511 of SEQ ID NO:149, which can result in a proline or phenylalanine residue at corresponding aa position 504 of SEQ ID NO:150; a CGA/TGG polymorphism at nt positions 1525-1527 of SEQ ID NO:149, which can result in an arginine or tryptophan residue at corresponding aa position 509 of SEQ ID NO:150; a C/A polymorphism at nt position 1639 of SEQ ID NO:149, which can result in a histidine or asparagine residue at corresponding aa position 547 of SEQ ID NO:150; a silent C/G polymorphism at nt position 1695 of SEQ ID NO:149, both of which result in a proline residue at corresponding aa position 565 of SEQ ID NO:150; a G/C polymorphism at nt position 1737 of SEQ ID NO:149, which can result in a glutamine or histidine residue at corresponding aa position 579 of SEQ ID NO:150; a G/T polymorphism at nt position 1774 of SEQ ID NO:149, which can result in an alanine or serine residue at corresponding aa position 592 of SEQ ID NO:150; a silent G/A polymorphism at nt position 1794 of SEQ ID NO:149, both of which result in a proline residue at corresponding aa position 598 of SEQ ID NO:150; a TGG/CGA polymorphism at nt positions 1804-1806 of SEQ ID NO:149, which can result in a tryptophan or arginine residue at corresponding aa position 602 of SEQ ID NO:150; a silent C/T polymorphism at nt position 1923 of SEQ ID NO:149, both of which result in an asparagine residue at corresponding aa position 641 of SEQ ID NO:150; a CG/TG/CA polymorphism at nt positions 1939-1940 of SEQ ID NO:149, which can result in an arginine, cysteine, or histidine residue at corresponding aa position 647 of SEQ ID NO:150; a G/C polymorphism at nt position 272 of SEQ ID NO:154, which can result in an arginine or proline residue at corresponding aa position 91 of SEQ ID NO:155; a G/C polymorphism at nt position 284 of SEQ ID NO:154, which can result in an arginine or proline residue at corresponding aa position 95 of SEQ ID NO:155; a T/C polymorphism at nt position 799 of SEQ ID NO:154, which can result in a tyrosine or histidine residue at corresponding aa position 267 of SEQ ID NO:155; a C/G polymorphism at nt position 1159 of SEQ ID NO:154, which can result in a proline or alanine residue at corresponding aa position 387 of SEQ ID NO:155; a silent C/G polymorphism at nt position 1224 of SEQ ID NO:154, both of which result in a leucine residue at corresponding aa position 408 of SEQ ID NO:155; a C/T polymorphism at nt position 1243 of SEQ ID NO:154, which can result in a histidine or tyrosine residue at corresponding aa position 415 of SEQ ID NO:155; a G/A polymorphism at nt position 1253 of SEQ ID NO:154, which can result in a glycine or aspartate residue at corresponding aa position 418 of SEQ ID NO:155; a silent T/C polymorphism at nt position 1269 of SEQ ID NO:154, both of which result in an arginine residue at corresponding aa position 423 of SEQ ID NO:155; a G/A polymorphism at nt position 1271 of SEQ ID NO:154, which can result in an arginine or lysine residue at corresponding aa position 424 of SEQ ID NO:155; a silent C/A polymorphism at nt position 1395 of SEQ ID NO:154, both of which result in a serine residue at corresponding aa position 465 of SEQ ID NO:155; a G/A polymorphism at nt position 1396 of SEQ ID NO:154, which can result in a valine or isoleucine residue at corresponding aa position 466 of SEQ ID NO:155; a silent C/T polymorphism at nt position 1404 of SEQ ID NO:154, both of which result in a valine residue at corresponding aa position 468 of SEQ ID NO:155; a silent T/C polymorphism at nt position 1407 of SEQ ID NO:154, both of which result in a proline residue at corresponding aa position 469 of SEQ ID NO:155; a silent A/C polymorphism at nt position 1668 of SEQ ID NO:154, both of which result in a serine residue at corresponding aa position 556 of SEQ ID NO:155; a G/A polymorphism at nt position 652 of SEQ ID NO:157 (denoted by an “r” in the Sequence Listing), which can result in a valine or methionine residue at corresponding aa position 218 of SEQ ID NO:158; and a silent G/A polymorphism at nt position 942 of SEQ ID NO:157 (denoted by an “r” in the Sequence Listing), both of which result in a lysine residue at corresponding aa position 314 of SEQ ID NO:158. The present invention contemplates sequences having any or all of the described polymorphisms, as well as all combinations and permutations thereof.

[0049] Because of their potential medical significance and their role in neural development, semaphorin protein family members have been subject to considerable scientific scrutiny. For example, U.S. Pat. Nos. 5,981,222, 6,013,781, and 5,935,865 describe other semaphorin protein family members, as well as applications, utilities, and uses that also pertain to the presently described semphorin-like proteins and semaphorin protein family members.

[0050] An additional application of the described novel human polynucleotide sequences is their use in the molecular mutagenesis/evolution of proteins that are at least partially encoded by the described novel sequences using, for example, polynucleotide shuffling or related methodologies. Such approaches are described in U.S. Pat. Nos. 5,830,721 and 5,837,458.

[0051] The described membrane protein gene products can also be expressed in non-human transgenic animals. Animals of any non-human species, including, but not limited to, worms, mice, rats, rabbits, guinea pigs, pigs, micro-pigs, birds, goats, and non-human primates, e.g., baboons, monkeys, and chimpanzees, may be used to generate membrane protein transgenic animals.

[0052] Any technique known in the art may be used to introduce a membrane protein transgene into animals to produce the founder lines of transgenic animals. Such techniques include, but are not limited to, pronuclear microinjection (U.S. Pat. No. 4,873,191), retrovirus-mediated gene transfer into germ lines (Van der Putten et al., Proc. Natl. Acad. Sci. USA 82:6148-6152, 1985), gene targeting in embryonic stem cells (Thompson et al., Cell 56:313-321, 1989), electroporation of embryos (Lo, Mol. Cell. Biol. 3:1803-1814, 1983), and sperm-mediated gene transfer (Lavitrano et al., Cell 57:717-723, 1989), etc. For a review of such techniques, see, e.g., Gordon, Intl. Rev. Cytol. 115:171-229, 1989.

[0053] The present invention provides for transgenic animals that carry a membrane protein transgene in all their cells, as well as animals that carry a membrane protein transgene in some, but not all their cells, i.e., mosaic animals or somatic cell transgenic animals. A transgene may be integrated as a single transgene, or in concatamers, e.g., head-to-head tandems or head-to-tail tandems. A transgene may also be selectively introduced into and activated in a particular cell-type by following, for example, the teaching of Lasko et al., Proc. Natl. Acad. Sci. USA 89:6232-6236, 1992. The regulatory sequences required for such a cell-type specific activation will depend upon the particular cell-type of interest, and will be apparent to those of skill in the art.

[0054] When it is desired that a membrane protein transgene be integrated into the chromosomal site of the endogenous membrane protein gene, gene targeting is preferred. Briefly, when such a technique is to be utilized, vectors containing some nucleotide sequences homologous to the endogenous membrane protein gene are designed for the purpose of integrating, via homologous recombination with chromosomal sequences, into and disrupting the function of the nucleotide sequence of the endogenous membrane protein gene (i.e., “knock-out” animals).

[0055] The transgene can also be selectively introduced into a particular cell-type, thus inactivating the endogenous membrane protein gene in only that cell-type, by following, for example, the teaching of Gu et al., Science 265:103-106, 1994. The regulatory sequences required for such a cell-type specific inactivation will depend upon the particular cell-type of interest, and will be apparent to those of skill in the art.

[0056] Once transgenic animals have been generated, the expression of the recombinant membrane protein gene may be assayed utilizing standard techniques. Initial screening may be accomplished by Southern blot analysis or PCR techniques to analyze animal tissues to assay whether integration of the transgene has taken place. The level of mRNA expression of the transgene in the tissues of the transgenic animals may also be assessed using techniques that include, but are not limited to, Northern blot analysis of tissue samples obtained from the animal, in situ hybridization analysis, and RT-PCR. Samples of membrane protein gene-expressing tissue may also be evaluated immunocytochemically using antibodies specific for a membrane protein transgene product.

[0057] The present invention also provides for “knock-in” animals. Knock-in animals are those in which a polynucleotide sequence (i.e., a gene or a cDNA) that the animal does not naturally have in its genome is inserted in such a way that it is expressed. Examples include, but are not limited to, a human gene or cDNA used to replace its murine ortholog in the mouse, a murine cDNA used to replace the murine gene in the mouse, and a human gene or cDNA or murine cDNA that is tagged with a reporter construct used to replace the murine ortholog or gene in the mouse. Such replacements can occur at the locus of the murine ortholog or gene, or at another specific site. Such knock-in animals are useful for the in vivo study, testing and validation of, intra alia, human drug targets, as well as for compounds that are directed at the same, and therapeutic proteins.

### 7.2 Membrane Protein Amino Acid Sequences

[0058] The described membrane proteins, polypeptides, peptide fragments, mutated, truncated, or deleted forms of the membrane proteins, and/or membrane protein fusion proteins can be prepared for a variety of uses. These uses include, but are not limited to, the generation of antibodies, as reagents in diagnostic assays, for the identification of other cellular gene products related to the described membrane proteins, and as reagents in assays for screening for compounds that can be used as pharmaceutical reagents useful in the therapeutic treatment of mental, biological, or medical disorders and diseases. Given the similarity information and expression data, the described membrane proteins can be targeted (by drugs, oligonulceotides, antibodies, etc.) in order to treat disease (and particularly diseases of the blood or immune system), to therapeutically supplant or augment the efficacy of, for example, chemotherapeutic agents used in the treatment of cancer (for example breast or prostate cancer), agents used to promote healing or in the treatment of inflammatory disorders, arthritis, or infectious disease, or as antiviral agents. The described sequences are also useful as cancer, particularly carcinoma, diagnostic markers.

[0059] The Sequence Listing discloses the amino acid sequences encoded by the described membrane protein nucleic acid sequences. The membrane proteins display initiator methionines in DNA sequence contexts consistent with translation initiation sites, and many display hydrophobic regions near their N-termini that can serve as signal sequences, which indicates that the described membrane proteins can be membrane-associated, secreted, or cytoplasmic. Certain of the described proteins have tandem N-terminal methionines, either of which can serve to initiate translation. Of particular note, solubilized versions of the N-terminal extracellular domain(s) of SEQ ID NOS:123 and 125 (approximately 170 N-terminal amino acids less the signal sequence) can be directly used in therapeutic applications.

[0060] The amino acid sequences of the invention include the amino acid sequence presented in the Sequence Listing, as well as analogues and derivatives thereof. Further, corresponding membrane protein homologues from other species are encompassed by the invention. In fact, any membrane protein encoded by the membrane protein nucleotide sequences described herein are within the scope of the invention, as are any novel polynucleotide sequences encoding all or any novel portion of an amino acid sequence presented in the Sequence Listing. The degenerate nature of the genetic code is well-known, and, accordingly, each amino acid presented in the Sequence Listing is generically representative of the well-known nucleic acid “triplet” codon, or in many cases codons, that can encode the amino acid. As such, as contemplated herein, the amino acid sequences presented in the Sequence Listing, when taken together with the genetic code (see, for example, “Molecular Cell Biology”, Table 4-1 at page 109 (Darnell et al., eds., Scientific American Books, New York, N.Y., 1986)), are generically representative of all the various permutations and combinations of nucleic acid sequences that can encode such amino acid sequences.

[0061] The invention also encompasses proteins that are functionally equivalent to the membrane proteins encoded by the presently described nucleotide sequences, as judged by any of a number of criteria, including, but not limited to, the ability to bind and cleave a substrate of a membrane protein, the ability to effect an identical or complementary downstream pathway, or a change in cellular metabolism (e.g., proteolytic activity, ion flux, tyrosine phosphorylation, etc.). Such functionally equivalent membrane proteins include, but are not limited to, additions or substitutions of amino acid residues within the amino acid sequence encoded by the membrane protein nucleotide sequences described herein, but that result in a silent change, thus producing a functionally equivalent expression product. Amino acid substitutions may be made on the basis of similarity in polarity, charge, solubility, hydrophobicity, hydrophilicity, and/or the amphipathic nature of the residues involved. For example, nonpolar (hydrophobic) amino acids include alanine, leucine, isoleucine, valine, proline, phenylalanine, tryptophan, and methionine; polar neutral amino acids include glycine, serine, threonine, cysteine, tyrosine, asparagine, and glutamine; positively charged (basic) amino acids include arginine, lysine, and histidine; and negatively charged (acidic) amino acids include aspartic acid and glutamic acid.

[0062] A variety of host-expression vector systems can be used to express the membrane protein nucleotide sequences of the invention. Where, as in the present instance, the described proteins are thought to be membrane proteins, the hydrophobic regions of the protein can be excised and the resulting soluble peptide or polypeptide can be recovered from the culture media. Such expression systems also encompass engineered host cells that express a membrane protein, or functional equivalent, in situ. Purification or enrichment of a membrane protein from such expression systems can be accomplished using appropriate detergents and lipid micelles and methods well-known to those skilled in the art. However, such engineered host cells themselves may be used in situations where it is important not only to retain the structural and functional characteristics of a membrane protein, but to assess biological activity, e.g., in certain drug screening assays.

[0063] The expression systems that may be used for purposes of the invention include, but are not limited to, microorganisms such as bacteria (e.g., E. coli, B. subtilis) transformed with recombinant bacteriophage DNA, plasmid DNA or cosmid DNA expression vectors containing membrane protein nucleotide sequences; yeast (e.g., Saccharomyces, Pichia) transformed with recombinant yeast expression vectors containing membrane protein nucleotide sequences; insect cell systems infected with recombinant virus expression vectors (e.g., baculovirus) containing membrane protein nucleotide sequences; plant cell systems infected with recombinant virus expression vectors (e.g., cauliflower mosaic virus, CaMV; tobacco mosaic virus, TMV) or transformed with recombinant plasmid expression vectors (e.g., Ti plasmid) containing membrane protein nucleotide sequences; or mammalian cell systems (e.g., COS, CHO, BHK, 293, 3T3) harboring recombinant expression constructs containing membrane protein nucleotide sequences and promoters derived from the genome of mammalian cells (e.g., metallothionein promoter) or from mammalian viruses (e.g., the adenovirus late promoter; the vaccinia virus 7.5K promoter).

[0064] In bacterial systems, a number of expression vectors may be advantageously selected depending upon the use intended for the membrane protein product being expressed. For example, when a large quantity of such a protein is to be produced for the generation of pharmaceutical compositions of or containing a membrane protein, or for raising antibodies to a membrane protein, vectors that direct the expression of high levels of fusion protein products that are readily purified may be desirable. Such vectors include, but are not limited to, the E. coli expression vector pUR278 (Ruther and Muller-Hill, EMBO J. 2:1791-1794, 1983), in which a membrane protein coding sequence may be ligated individually into the vector in frame with the lacZ coding region so that a fusion protein is produced, pIN vectors (Inouye and Inouye, Nucl. Acids Res. 13:3101-3109, 1985; Van Heeke and Schuster, J. Biol. Chem. 264:5503-5509, 1989), and the like. pGEX vectors (Pharmacia or American Type Culture Collection) can also be used to express foreign polypeptides as fusion proteins with glutathione S-transferase (GST). In general, such fusion proteins are soluble and can easily be purified from lysed cells by adsorption to glutathione-agarose beads followed by elution in the presence of free glutathione. The PGEX vectors are designed to include thrombin or factor Xa protease cleavage sites so that the cloned target expression product can be released from the GST moiety.

[0065] In an exemplary insect system, Autographa californica nuclear polyhedrosis virus (AcNPV) is used as a vector to express foreign polynucleotide sequences. The virus grows in Spodoptera frugiperda cells. A membrane protein coding sequence can be cloned individually into a non-essential region (for example the polyhedrin gene) of the virus and placed under control of an AcNPV promoter (for example the polyhedrin promoter). Successful insertion of a membrane protein coding sequence will result in inactivation of the polyhedrin gene and production of non-occluded recombinant virus (i.e., virus lacking the proteinaceous coat coded for by the polyhedrin gene). These recombinant viruses are then used to infect Spodoptera frugiperda cells in which the inserted sequence is expressed (see, e.g., Smith et al., J. Virol. 46:584-593, 1983, and U.S. Pat. No. 4,215,051).

[0066] In mammalian host cells, a number of viral-based expression systems may be utilized. In cases where an adenovirus is used as an expression vector, the membrane protein nucleotide sequence of interest may be ligated to an adenovirus transcription/translation control complex, e.g., the late promoter and tripartite leader sequence. This chimeric sequence may then be inserted in the adenovirus genome by in vitro or in vivo recombination. Insertion in a non-essential region of the viral genome (e.g., region E1 or E3) will result in a recombinant virus that is viable and capable of expressing a membrane protein product in infected hosts (see, e.g., Logan and Shenk, Proc. Natl. Acad. Sci. USA 81:3655-3659, 1984). Specific initiation signals may also be required for efficient translation of inserted membrane protein nucleotide sequences. These signals include the ATG initiation codon and adjacent sequences. In cases where an entire membrane protein gene or cDNA, including its own initiation codon and adjacent sequences, is inserted into the appropriate expression vector, no additional translational control signals may be needed. However, in cases where only a portion of a membrane protein coding sequence is inserted, exogenous translational control signals, including, perhaps, the ATG initiation codon, may be provided. Furthermore, the initiation codon should be in phase with the reading frame of the desired coding sequence to ensure translation of the entire insert. These exogenous translational control signals and initiation codons can be of a variety of origins, both natural and synthetic. The efficiency of expression may be enhanced by the inclusion of appropriate transcription enhancer elements, transcription terminators, etc. (see, e.g., Bitter et al., Methods Enzymol. 153:516-544, 1987).

[0067] In addition, a host cell strain may be chosen that modulates the expression of the inserted sequences, or modifies and processes the expression product in the specific fashion desired. Such modifications (e.g., glycosylation) and processing (e.g., cleavage) of protein products may be important for the function of the protein. Different host cells have characteristic and specific mechanisms for the post-translational processing and modification of proteins and expression products. Appropriate cell lines or host systems can be chosen to ensure the desired modification and processing of the foreign protein expressed. To this end, eukaryotic host cells that possess the cellular machinery for the desired processing of the primary transcript, glycosylation, and phosphorylation of the expression product may be used. Such mammalian host cells include, but are not limited to, CHO, VERO, BHK, HeLa, COS, MDCK, 293, 3T3, WI38, and in particular, human cell lines.

[0068] For long-term, high-yield production of recombinant proteins, stable expression is preferred. For example, cell lines that stably express the membrane protein sequences described herein can be engineered. Rather than using expression vectors that contain viral origins of replication, host cells can be transformed with DNA controlled by appropriate expression control elements (e.g., promoter, enhancer sequences, transcription terminators, polyadenylation sites, etc.), and a selectable marker. Following the introduction of the foreign DNA, engineered cells may be allowed to grow for 1-2 days in an enriched media, and then switched to a selective media. The selectable marker in the recombinant plasmid confers resistance to the selection and allows cells to stably integrate the plasmid into their chromosomes and grow to form foci, which in turn can be cloned and expanded into cell lines. This method may advantageously be used to engineer cell lines that express a membrane protein product. Such engineered cell lines may be particularly useful in screening and evaluation of compounds that affect the endogenous activity of a membrane protein product.

[0069] A number of selection systems may be used, including, but not limited to, the herpes simplex virus thymidine kinase (Wigler et al., Cell 11:223-232, 1977), hypoxanthine-guanine phosphoribosyltransferase (Szybalska and Szybalski, Proc. Natl. Acad. Sci. USA 48:2026-2034, 1962), and adenine phosphoribosyltransferase (Lowy et al., Cell 22:817-823, 1980) genes, which can be employed in tk⁻, hgprt⁻ or aprt⁻ cells, respectively. Also, antimetabolite resistance can be used as the basis of selection for the following genes: dihydrofolate reductase (dhfr), which confers resistance to methotrexate (Wigler et al., Proc. Natl. Acad. Sci. USA 77:3567-3570, 1980, and O'Hare et al., Proc. Natl. Acad. Sci. USA 78:1527-1531, 1981); guanine phosphoribosyl transferase (gpt), which confers resistance to mycophenolic acid (Mulligan and Berg, Proc. Natl. Acad. Sci. USA 78:2072-2076, 1981); neomycin phosphotransferase (neo), which confers resistance to G-418 (Colbere-Garapin et al., J. Mol. Biol. 150:1-14, 1981); and hygromycin B phosphotransferase (hpt), which confers resistance to hygromycin (Santerre et al., Gene 30:147-156, 1984).

[0070] Alternatively, any fusion protein can be readily purified by utilizing an antibody specific for the fusion protein being expressed. Another exemplary system allows for the ready purification of non-denatured fusion proteins expressed in human cell lines (Janknecht et al., Proc. Natl. Acad. Sci. USA 88:8972-8976, 1991). In this system, the sequence of interest is subcloned into a vaccinia recombination plasmid such that the sequence's open reading frame is translationally fused to an amino-terminal tag consisting of six histidine residues. Extracts from cells infected with recombinant vaccinia virus are loaded onto Ni²⁺-nitriloacetic acid-agarose columns, and histidine-tagged proteins are selectively eluted with imidazole-containing buffers.

[0071] Also encompassed by the present invention are fusion proteins that direct a membrane protein to a target organ and/or facilitate transport across the membrane into the cytosol. Conjugation of membrane proteins to antibody molecules or their Fab fragments could be used to target cells bearing a particular epitope. Attaching an appropriate signal sequence to a membrane protein would also transport a membrane protein to a desired location within the cell. Alternatively, targeting of a membrane protein or its nucleic acid sequence might be achieved using liposome or lipid complex based delivery systems. Such technologies are described in “Liposomes: A Practical Approach” (New, R. R. C., ed., IRL Press, New York, N.Y., 1990), and in U.S. Pat. Nos. 4,594,595, 5,459,127, 5,948,767 and 6,110,490. Additionally embodied are novel protein constructs engineered in such a way that they facilitate transport of membrane proteins to a target site or desired organ, where they cross the cell membrane and/or the nucleus, where the membrane proteins can exert their functional activity. This goal may be achieved by coupling of a membrane protein to a cytokine or other ligand that provides targeting specificity, and/or to a protein transducing domain (see generally U.S. Provisional Patent Application Serial Nos. 60/111,701 and 60/056,713 for examples of such transducing sequences), to facilitate passage across cellular membranes, and can optionally be engineered to include nuclear localization signals.

[0072] Additionally contemplated are oligopeptides that are modeled on an amino acid sequence first described in the Sequence Listing. Such membrane protein oligopeptides are generally between about 10 to about 100 amino acids long, or between about 16 to about 80 amino acids long, or between about 20 to about 35 amino acids long, or any variation or combination of sizes represented therein that incorporate a contiguous region of sequence first disclosed in the Sequence Listing. Such membrane protein oligopeptides can be of any length disclosed within the above ranges and can initiate at any amino acid position represented in the Sequence Listing.

[0073] The invention also contemplates “substantially isolated” or “substantially pure” proteins or polypeptides. By a “substantially isolated” or “substantially pure” protein or polypeptide is meant a protein or polypeptide that has been separated from at least some of those components that naturally accompany it. Typically, the protein or polypeptide is substantially isolated or pure when it is at least 60%, by weight, free from the proteins and other naturally-occurring organic molecules with which it is naturally associated in vivo. Preferably, the purity of the preparation is at least 75%, more preferably at least 90%, and most preferably at least 99%, by weight. A substantially isolated or pure protein or polypeptide may be obtained, for example, by extraction from a natural source, by expression of a recombinant nucleic acid encoding the protein or polypeptide, or by chemically synthesizing the protein or polypeptide.

[0074] Purity can be measured by any appropriate method, e.g., column chromatography such as immunoaffinity chromatography using an antibody specific for the protein or polypeptide, polyacrylamide gel electrophoresis, or HPLC analysis. A protein or polypeptide is substantially free of naturally associated components when it is separated from at least some of those contaminants that accompany it in its natural state. Thus, a polypeptide that is chemically synthesized or produced in a cellular system different from the cell from which it naturally originates will be, by definition, substantially free from its naturally associated components. Accordingly, substantially isolated or pure proteins or polypeptides include eukaryotic proteins synthesized in E. coli, other prokaryotes, or any other organism in which they do not naturally occur.

### 7.3 Antibodies to Membrane Proteins

[0075] Antibodies that specifically recognize one or more epitopes of a membrane protein, epitopes of conserved variants of a membrane protein, or peptide fragments of a membrane protein, are also encompassed by the invention. Such antibodies include, but are not limited to, polyclonal antibodies, monoclonal antibodies (mAbs), humanized or chimeric antibodies, single chain antibodies, Fab fragments, F(ab′)₂ fragments, fragments produced by a Fab expression library, anti-idiotypic (anti-Id) antibodies, and epitope-binding fragments of any of the above.

[0076] The antibodies of the invention may be used, for example, in the detection of a membrane protein in a biological sample and may, therefore, be utilized as part of a diagnostic or prognostic technique whereby patients may be tested for abnormal amounts of a membrane protein. Such antibodies may also be utilized in conjunction with, for example, compound screening schemes for the evaluation of the effect of test compounds on expression and/or activity of a membrane protein expression product. Additionally, such antibodies can be used in conjunction with gene therapy to, for example, evaluate normal and/or engineered membrane protein-expressing cells prior to their introduction into a patient. Such antibodies may additionally be used in methods for the inhibition of abnormal membrane protein activity. Thus, such antibodies may be utilized as a part of treatment methods.

[0077] For the production of antibodies, various host animals may be immunized by injection with a membrane protein, a membrane protein peptide (e.g., one corresponding to a functional domain of a membrane protein), a truncated membrane protein polypeptide (a membrane protein in which one or more domains have been deleted), functional equivalents of a membrane protein or mutated variants of a membrane protein. Such host animals may include, but are not limited to, pigs, rabbits, mice, goats, and rats, to name but a few. Various adjuvants may be used to increase the immunological response, depending on the host species, including, but not limited to, Freund's adjuvant (complete and incomplete), mineral salts such as aluminum hydroxide or aluminum phosphate, chitosan, surface active substances such as lysolecithin, pluronic polyols, polyanions, peptides, oil emulsions, and potentially useful human adjuvants such as BCG (bacille Calmette-Guerin) and Corynebacterium parvum. Alternatively, the immune response could be enhanced by combination and/or coupling with molecules such as keyhole limpet hemocyanin, tetanus toxoid, diphtheria toxoid, ovalbumin, cholera toxin, or fragments thereof. Polyclonal antibodies are heterogeneous populations of antibody molecules derived from the sera of the immunized animals.

[0078] Monoclonal antibodies, which are homogeneous populations of antibodies to a particular antigen, can be obtained by any technique that provides for the production of antibody molecules by continuous cell lines in culture. These include, but are not limited to, the hybridoma technique (Kohler and Milstein, Nature 256:495-497, 1975, and U.S. Pat. No. 4,376,110), the human B-cell hybridoma technique (Kosbor et al., Immunology Today 4:72, 1983, and Cole et al., Proc. Natl. Acad. Sci. USA 80:2026-2030, 1983), and the EBV-hybridoma technique (Cole et al., in “Monoclonal Antibodies and Cancer Therapy”, Vol. 27, UCLA Symposia on Molecular and Cellular Biology, New Series, pp. 77-96 (Reisfeld and Sell, eds., Alan R. Liss, Inc. New York, N.Y., 1985)). Such antibodies may be of any immunoglobulin class, including IgG, IgM, IgE, IgA, and IgD, and any subclass thereof. The hybridomas producing the mabs of this invention may be cultivated in vitro or in vivo. Production of high titers of mAbs in vivo makes this the presently preferred method of production.

[0079] In addition, techniques developed for the production of “chimeric antibodies” (Morrison et al., Proc. Natl. Acad. Sci. USA 81:6851-6855, 1984, Neuberger et al., Nature 312:604-608, 1984, and Takeda et al., Nature 314:452-454, 1985) by splicing the genes from a mouse antibody molecule of appropriate antigen specificity together with genes from a human antibody molecule of appropriate biological activity can be used. A chimeric antibody is a molecule in which different portions are derived from different animal species, such as those having a variable region derived from a murine mAb and a human immunoglobulin constant region. Such technologies are described in U.S. Pat. Nos. 6,114,598, 6,075,181, and 5,877,397. Also encompassed by the present invention is the use of fully humanized monoclonal antibodies, as described in U.S. Pat. No. 6,150,584.

[0080] Alternatively, techniques described for the production of single chain antibodies (U.S. Pat. No. 4,946,778, Bird, Science 242:423-426, 1988, Huston et al., Proc. Natl. Acad. Sci. USA 85:5879-5883, 1988, and Ward et al., Nature 341:544-546, 1989) can be adapted to produce single chain antibodies against membrane protein expression products. Single chain antibodies are formed by linking the heavy and light chain fragments of the Fv region via an amino acid bridge, resulting in a single chain polypeptide.

[0081] Antibody fragments that recognize specific epitopes may be generated by known techniques. For example, such fragments include, but are not limited to: F(ab′)₂ fragments, which can be produced by pepsin digestion of an antibody molecule; and Fab fragments, which can be generated by reducing the disulfide bridges of F(ab′)₂ fragments. Alternatively, Fab expression libraries may be constructed (Huse et al., Science 246:1275-1281, 1989) to allow rapid and easy identification of monoclonal Fab fragments with the desired specificity.

[0082] Antibodies to a membrane protein can, in turn, be utilized to generate anti-idiotype antibodies that “mimic” a given membrane protein, using techniques well-known to those skilled in the art (see, e.g., Greenspan and Bona, FASEB J. 7:437-444, 1993, and Nissinoff, J. Immunol. 147:2429-2438, 1991). For example, antibodies that bind to a membrane protein domain and competitively inhibit the binding of the membrane protein to its cognate receptor can be used to generate anti-idiotypes that “mimic” the membrane protein and, therefore, bind and activate or neutralize a receptor. Such anti-idiotypic antibodies, or Fab fragments of such anti-idiotypes, can be used in therapeutic regimens involving a membrane protein-mediated pathway.

[0083] Additionally given the high degree of relatedness of mammalian membrane proteins, membrane protein knock-out mice (having never seen a membrane protein, and thus never been tolerized to a membrane protein) have an unique utility, as they can be advantageously applied to the generation of antibodies against the disclosed mammalian membrane proteins (i.e., a membrane protein will be immunogenic in membrane protein knock-out animals).

[0084] The present invention is not to be limited in scope by the specific embodiments described herein, which are intended as single illustrations of individual aspects of the invention, and functionally equivalent methods and components are within the scope of the invention. Indeed, various modifications of the invention, in addition to those shown and described herein, will become apparent to those skilled in the art from the foregoing description. Such modifications are intended to fall within the scope of the appended claims. All cited publications, patents, and patent applications are herein incorporated by reference in their entirety.

The application's sequence listing, which the Patent Office published only in electronic form, follows.

SEQUENCE LISTING (163 sequences)

SEQ ID NO: 1 - DNA, 1464 bp, Homo sapiens
  CDS (1)...(1464)
atgacatctaagaattatcccgggacctaccccaatcacactgtttgcgaaaagacaattacagtaccaaaggggaaaagactgattctgaggttgggagatttggatatcgaatcccagacctgtgcttctgactatcttctcttcaccagctcttcagatcaatatggtccatactgtggaagtatgactgttcccaaagaactcttgttgaacacaagtgaagtaaccgtccgctttgagagtggatcccacatttctggccggggttttttgctgacctatgcgagcagcgaccatccagatttaataacatgtttggaacgagctagccattatttgaagacagaatacagcaaattctgcccagctggttgtagagacgtagcaggagacatttctgggaatatggtagatggatatagagatacctctttattgtgcaaagctgccatccatgcaggaataattgctgatgaactaggtggccagatcagtgtgcttcagcgcaaagggatcagtcgatatgaagggattctggccaatggtgttctttcgagggatggttccctgtcagacaagcgatttctgtttacctccaatggttgcagcagatccttgagttttgaacctgacgggcaaatcagagcttcttcctcatggcagtcggtcaatgagagtggagaccaagttcactggtctcctggccaagcccgacttcaggaccaaggcccatcatgggcttcgggcgacagtagcaacaaccacaaaccacgagagtggctggagatcgatttgggggagaaaaagaaaataacaggaattaggaccacaggatctacacagtcgaacttcaacttttatgttaagagttttgtgatgaacttcaaaaacaataattctaagtggaagacctataaaggaattgtgaataatgaagaaaaggtgtttcagggtaactctaactttcgggacccagtgcaaaacaatttcatccctcccatcgtggccagatatgtgcgggttgtcccccagacatggcaccagaggatagccttgaaggtggagctcattggttgccagattacacaaggtaatgattcattggtgtggcgcaagacaagtcaaagcaccagtgtttcaactaagaaagaagatgagacaatcacaaggcccatcccctcggaagaaacatccacaggaataaacattacaacggtggctattccattggtgctccttgttgtcctggtgtttgctggaatggggatctttgcagcctttagaaagaagaagaagaaaggaagtccgtatggatcagcggaggctcagaaaacagactgttggaagcagattaaatatccctttgccagacatcagtcagctgagtttaccatcagctatgataatgagaaggagatgacacaaaagttagatctcatcacaagtgatatggcaggttaa

SEQ ID NO: 2 - protein, 487 aa, Homo sapiens
MTSKNYPGTYPNHTVCEKTITVPKGKRLILRLGDLDIESQTCASDYLLFTSSSDQYGPYCGSMTVPKELLLNTSEVTVRFESGSHISGRGFLLTYASSDHPDLITCLERASHYLKTEYSKFCPAGCRDVAGDISGNMVDGYRDTSLLCKAAIHAGIIADELGGQISVLQRKGISRYEGILANGVLSRDGSLSDKRFLFTSNGCSRSLSFEPDGQIRASSSWQSVNESGDQVHWSPGQARLQDQGPSWASGDSSNNHKPREWLEIDLGEKKKITGIRTTGSTQSNFNFYVKSFVMNFKNNNSKWKTYKGIVNNEEKVFQGNSNFRDPVQNNFIPPIVARYVRVVPQTWHQRIALKVELIGCQITQGNDSLVWRKTSQSTSVSTKKEDETITRPIPSEETSTGINITTVAIPLVLLVVLVFAGMGIFAAFRKKKKKGSPYGSAEAQKTDCWKQIKYPFARHQSAEFTISYDNEKEMTQKLDLITSDMAG

SEQ ID NO: 3 - DNA, 1761 bp, Homo sapiens
  CDS (1)...(1761)
atgggattcggtgcggggcagcgactgcgccccgtcccggcgccgcgctcgtccgcagaggaggcggcccggcccgggcagctgcggctcgggatccgtcgaggggaggccgagcttgccaagctggcgcccagcggggtcatggtgcccggcgcccgcggcggcggcgcactggcgcgggctgccgggcggggcctcctggctttgctgctcgcggtctccgccccgctccggctgcaggcggaggagctgggtgatggctgtggacacctagtgacttatcaggatagtggcacaatgacatctaagaattatcccgggacctaccccaatcacactgtttgcgaaaagacaattacagtaccaaaggggaaaagactgattctgaggttgggagatttggatatcgaatcccagacctgtgcttctgactatcttctcttcaccagctcttcagatcaatatggtccatactgtggaagtatgactgttcccaaagaactcttgttgaacacaagtgaagtaaccgtccgctttgagagtggatcccacatttctggccggggttttttgctgacctatgcgagcagcgaccatccagatttaataacatgtttggaacgagctagccattatttgaagacagaatacagcaaattctgcccagctggttgtagagacgtagcaggagacatttctgggaatatggtagatggatatagagatacctctttattgtgcaaagctgccatccatgcaggaataattgctgatgaactaggtggccagatcagtgtgcttcagcgcaaagggatcagtcgatatgaagggattctggccaatggtgttctttcgagggatggttccctgtcagacaagcgatttctgtttacctccaatggttgcagcagatccttgagttttgaacctgacgggcaaatcagagcttcttcctcatggcagtcggtcaatgagagtggagaccaagttcactggtctcctggccaagcccgacttcaggaccaaggcccatcatgggcttcgggcgacagtagcaacaaccacaaaccacgagagtggctggagatcgatttgggggagaaaaagaaaataacaggaattaggaccacaggatctacacagtcgaacttcaacttttatgttaagagttttgtgatgaacttcaaaaacaataattctaagtggaagacctataaaggaattgtgaataatgaagaaaaggtgtttcagggtaactctaactttcgggacccagtgcaaaacaatttcatccctcccatcgtggccagatatgtgcgggttgtcccccagacatggcaccagaggatagccttgaaggtggagctcattggttgccagattacacaaggtaatgattcattggtgtggcgcaagacaagtcaaagcaccagtgtttcaactaagaaagaagatgagacaatcacaaggcccatcccctcggaagaaacatccacaggaataaacattacaacggtggctattccattggtgctccttgttgtcctggtgtttgctggaatggggatctttgcagcctttagaaagaagaagaagaaaggaagtccgtatggatcagcggaggctcagaaaacagactgttggaagcagattaaatatccctttgccagacatcagtcagctgagtttaccatcagctatgataatgagaaggagatgacacaaaagttagatctcatcacaagtgatatggcaggttaa

SEQ ID NO: 4 - protein, 586 aa, Homo sapiens
MGFGAGQRLRPVPAPRSSAEEAARPGQLRLGIRRGEAELAKLAPSGVMVPGARGGGALARAAGRGLLALLLAVSAPLRLQAEELGDGCGHLVTYQDSGTMTSKNYPGTYPNHTVCEKTITVPKGKRLILRLGDLDIESQTCASDYLLFTSSSDQYGPYCGSMTVPKELLLNTSEVTVRFESGSHISGRGFLLTYASSDHPDLITCLERASHYLKTEYSKFCPAGCRDVAGDISGNMVDGYRDTSLLCKAAIHAGIIADELGGQISVLQRKGISRYEGILANGVLSRDGSLSDKRFLFTSNGCSRSLSFEPDGQIRASSSWQSVNESGDQVHWSPGQARLQDQGPSWASGDSSNNHKPREWLEIDLGEKKKITGIRTTGSTQSNFNFYVKSFVMNFKNNNSKWKTYKGIVNNEEKVFQGNSNFRDPVQNNFIPPIVARYVRVVPQTWHQRIALKVELIGCQITQGNDSLVWRKTSQSTSVSTKKEDETITRPIPSEETSTGINITTVAIPLVLLVVLVFAGMGIFAAFRKKKKKGSPYGSAEAQKTDCWKQIKYPFARHQSAEFTISYDNEKEMTQKLDLITSDMAG

SEQ ID NO: 5 - DNA, 1620 bp, Homo sapiens
  CDS (1)...(1620)
atggtgcccggcgcccgcggcggcggcgcactggcgcgggctgccgggcggggcctcctggctttgctgctcgcggtctccgccccgctccggctgcaggcggaggagctgggtgatggctgtggacacctagtgacttatcaggatagtggcacaatgacatctaagaattatcccgggacctaccccaatcacactgtttgcgaaaagacaattacagtaccaaaggggaaaagactgattctgaggttgggagatttggatatcgaatcccagacctgtgcttctgactatcttctcttcaccagctcttcagatcaatatggtccatactgtggaagtatgactgttcccaaagaactcttgttgaacacaagtgaagtaaccgtccgctttgagagtggatcccacatttctggccggggttttttgctgacctatgcgagcagcgaccatccagatttaataacatgtttggaacgagctagccattatttgaagacagaatacagcaaattctgcccagctggttgtagagacgtagcaggagacatttctgggaatatggtagatggatatagagatacctctttattgtgcaaagctgccatccatgcaggaataattgctgatgaactaggtggccagatcagtgtgcttcagcgcaaagggatcagtcgatatgaagggattctggccaatggtgttctttcgagggatggttccctgtcagacaagcgatttctgtttacctccaatggttgcagcagatccttgagttttgaacctgacgggcaaatcagagcttcttcctcatggcagtcggtcaatgagagtggagaccaagttcactggtctcctggccaagcccgacttcaggaccaaggcccatcatgggcttcgggcgacagtagcaacaaccacaaaccacgagagtggctggagatcgatttgggggagaaaaagaaaataacaggaattaggaccacaggatctacacagtcgaacttcaacttttatgttaagagttttgtgatgaacttcaaaaacaataattctaagtggaagacctataaaggaattgtgaataatgaagaaaaggtgtttcagggtaactctaactttcgggacccagtgcaaaacaatttcatccctcccatcgtggccagatatgtgcgggttgtcccccagacatggcaccagaggatagccttgaaggtggagctcattggttgccagattacacaaggtaatgattcattggtgtggcgcaagacaagtcaaagcaccagtgtttcaactaagaaagaagatgagacaatcacaaggcccatcccctcggaagaaacatccacaggaataaacattacaacggtggctattccattggtgctccttgttgtcctggtgtttgctggaatggggatctttgcagcctttagaaagaagaagaagaaaggaagtccgtatggatcagcggaggctcagaaaacagactgttggaagcagattaaatatccctttgccagacatcagtcagctgagtttaccatcagctatgataatgagaaggagatgacacaaaagttagatctcatcacaagtgatatggcaggttaa

SEQ ID NO: 6 - protein, 539 aa, Homo sapiens
MVPGARGGGALARAAGRGLLALLLAVSAPLRLQAEELGDGCGHLVTYQDSGTMTSKNYPGTYPNHTVCEKTITVPKGKRLILRLGDLDIESQTCASDYLLFTSSSDQYGPYCGSMTVPKELLLNTSEVTVRFESGSHISGRGFLLTYASSDHPDLITCLERASHYLKTEYSKFCPAGCRDVAGDISGNMVDGYRDTSLLCKAAIHAGIIADELGGQISVLQRKGISRYEGILANGVLSRDGSLSDKRFLFTSNGCSRSLSFEPDGQIRASSSWQSVNESGDQVHWSPGQARLQDQGPSWASGDSSNNHKPREWLEIDLGEKKKITGIRTTGSTQSNFNFYVKSFVMNFKNNNSKWKTYKGIVNNEEKVFQGNSNFRDPVQNNFIPPIVARYVRVVPQTWHQRIALKVELIGCQITQGNDSLVWRKTSQSTSVSTKKEDETITRPIPSEETSTGINITTVAIPLVLLVVLVFAGMGIFAAFRKKKKKGSPYGSAEAQKTDCWKQIKYPFARHQSAEFTISYDNEKEMTQKLDLITSDMAG

SEQ ID NO: 7 - DNA, 1768 bp, Homo sapiens
ggcggaggagctgggtgatggctgtggacacctagtgacttatcaggatagtggcacaatgacatctaagaattatcccgggacctaccccaatcacactgtttgcgaaaagacaattacagtaccaaaggggaaaagactgattctgaggttgggagatttggatatcgaatcccagacctgtgcttctgactatcttctcttcaccagctcttcagatcaatatggtccatactgtggaagtatgactgttcccaaagaactcttgttgaacacaagtgaagtaaccgtccgctttgagagtggatcccacatttctggccggggttttttgctgacctatgcgagcagcgaccatccagatttaataacatgtttggaacgagctagccattatttgaagacagaatacagcaaattctgcccagctggttgtagagacgtagcaggagacatttctgggaatatggtagatggatatagagatacctctttattgtgcaaagctgccatccatgcaggaataattgctgatgaactaggtggccagatcagtgtgcttcagcgcaaagggatcagtcgatatgaagggattctggccaatggtgttctttcgagggatggttccctgtcagacaagcgatttctgtttacctccaatggttgcagcagatccttgagttttgaacctgacgggcaaatcagagcttcttcctcatggcagtcggtcaatgagagtggagaccaagttcactggtctcctggccaagcccgacttcaggaccaaggcccatcatgggcttcgggcgacagtagcaacaaccacaaaccacgagagtggctggagatcgatttgggggagaaaaagaaaataacaggaattaggaccacaggatctacacagtcgaacttcaacttttatgttaagagttttgtgatgaacttcaaaaacaataattctaagtggaagacctataaaggaattgtgaataatgaagaaaaggtgtttcagggtaactctaactttcgggacccagtgcaaaacaatttcatccctcccatcgtggccagatatgtgcgggttgtcccccagacatggcaccagaggatagccttgaaggtggagctcattggttgccagattacacaaggtaatgattcattggtgtggcgcaagacaagtcaaagcaccagtgtttcaactaagaaagaagatgagacaatcacaaggcccatcccctcggaagaaacatccacaggaataaacattacaacggtggctattccattggtgctccttgttgtcctggtgtttgctggaatggggatctttgcagcctttagaaagaagaagaagaaaggaagtccgtatggatcagcggaggctcagaaaacagactgttggaagcagattaaatatccctttgccagacatcagtcagctgagtttaccatcagctatgataatgagaaggagatgacacaaaagttagatctcatcacaagtgatatggcaggttaactccgttgactgccaaaatagcatccccaacgtgcagccctccgcatctatcagcaggttgccccggatggatctcagagatgaggattggaacaccatgttctttcccaccctaacaacaacaaagggcagtaaattaaagtactctttgtaaggtacagttaccgattaatctagagataaaatattttcttaaaaatatatttcattaaacacctatgctgtctctatgcaaaaaaaaaaaaa

SEQ ID NO: 8 - DNA, 2628 bp, Homo sapiens
  CDS (1)...(2628)
atggcctgtgccctagctgggaaggtcttcccaatggggagctggccagtgtggcacaaaagcctgcactgggccaacaaggtggaaggagaagcggcaggtggacggcaaggccccagcctccttctctcctccgcccctcttcccgcccaggactgggtggagccactgccttataagtggtggcctggtggcagcagagcaaactacaaccggcggccagcgggaccagagggcggctctgcaggcaggcggcagcggtgccctcagttccccagcatggccccctcggcctgggccatttgctggctgctagggggcctcctgctccatgggggtagctctggccccagccccggccccagtgtgccccgcctgcggctctcctaccgagacctcctgtctgccaaccgctctgccatctttctgggcccccagggctccctgaacctccaggccatgtacctagatgagtaccgagaccgcctctttctgggtggcctggacgccctctactctctgcggctggaccaggcatggccagatccccgggaggtcctgtggccaccgcagccaggacagagggaggagtgtgttcgaaagggaagagatcctttgacagagtgcgccaacttcgtgcgggtgctacagcctcacaaccggacccacctgctagcctgtggcactggggccttccagcccacctgtgccctcatcacagttggccaccgtggggagcatgtgctccacctggagcctggcagtgtggaaagtggccgggggcggtgccctcacgagcccagccgtccctttgccagcaccttcatagacggggagctgtacacgggtctcactgctgacttcctggggcgagaggccatgatcttccgaagtggaggtcctcggccagctctgcgttccgactctgaccagagtctcttgcacgacccccggtttgtgatggccgcccggatccctgagaactctgaccaggacaatgacaaggtgtacttcttcttctcggagacggtcccctcgcccgatggtggctcgaaccatgtcactgtcagccgcgtgggccgcgtctgcgtgaatgatgctgggggccagcgggtgctggtgaacaaatggagcactttcctcaaggccaggctggtctgctcggtgcccggccctggtggtgccgagacccactttgaccagctagaggatgtgttcctgctgtggcccaaggccgggaagagcctcgaggtgtacgcgctgttcagcaccgtcagtgccgtgttccagggcttcgccgtctgtgtgtaccacatggcagacatctgggaggttttcaacgggccctttgcccaccgagatgggcctcagcaccagtgggggccctatgggggcaaggtgcccttccctcgccctggcgtgtgccccagcaagatgaccgcacagccaggacggccttttggcagcaccaaggactacccagatgaggtgctgcagtttgcccgagcccaccccctcatgttctggcctgtgcggcctcgacatggccgccctgtccttgtcaagacccacctggcccagcagctacaccagatcgtggtggaccgcgtggaggcagaggatgggacctacgatgtcattttcctggggactgactcagggtctgtgctcaaagtcatcgctctccaggcagggggctcagctgaacctgaggaagtggttctggaggagctccaggtgtttaaggtgccaacacctatcaccgaaatggagatctctgtcaaaaggcaaatgctatacgtgggctctcggctgggtgtggcccagctgcggctgcaccaatgtgagacttacggcactgcctgtgcagagtgctgcctggcccgggacccatactgtgcctgggatggtgcctcctgtacccactaccgccccagccttggcaagcgccggttccgccggcaggacatccggcacggcaaccctgccctgcagtgcctgggccagagccaggaagaagaggcagtgggacttgtggcagccaccatggtctacggcacggagcacaatagcaccttcctggagtgcctgcccaagtctccccargctgctgtgcgctggctcttgcagaggccaggggatgaggggcctgaccaggtgaagacggacgagcgagtcttgcacacggagcgggggctgctgttccgcaggcttagccgtttcgatgcgggcacctacacctgcaccactctggagcatggcttctcccagactgtggtccgcctggctctggtggtgattgtggcctcacagctggacaacctgttccctccggagccaaagccagaggagcccccagcccggggaggcctggcttccaccccacccaaggcctggtacaaggacatcctgcagctcattggcttcgccaacctgccccgggtggatgagtactgtgagcgcgtgtggtgcaggggcaccacggaatgctcaggctgcttccggagccggagccggggcaagcaggccaggggcaagagctgggcagggctggagctaggcaagaagatgaagagccgggtgcatgccgagcacaatcggacgccccgggaggtggaggccacgtag

SEQ ID NO: 9 - protein, 875 aa, Homo sapiens
MACALAGKVFPMGSWPVWHKSLHWANKVEGEAAGGRQGPSLLLSSAPLPAQDWVEPLPYKWWPGGSRANYNRRPAGPEGGSAGRRQRCPQFPSMAPSAWAICWLLGGLLLHGGSSGPSPGPSVPRLRLSYRDLLSANRSAIFLGPQGSLNLQAMYLDEYRDRLFLGGLDALYSLRLDQAWPDPREVLWPPQPGQREECVRKGRDPLTECANFVRVLQPHNRTHLLACGTGAFQPTCALITVGHRGEHVLHLEPGSVESGRGRCPHEPSRPFASTFIDGELYTGLTADFLGREAMIFRSGGPRPALRSDSDQSLLHDPRFVMAARIPENSDQDNDKVYFFFSETVPSPDGGSNHVTVSRVGRVCVNDAGGQRVLVNKWSTFLKARLVCSVPGPGGAETHFDQLEDVFLLWPKAGKSLEVYALFSTVSAVFQGFAVCVYHMADIWEVFNGPFAHRDGPQHQWGPYGGKVPFPRPGVCPSKMTAQPGRPFGSTKDYPDEVLQFARAHPLMFWPVRPRHGRPVLVKTHLAQQLHQIVVDRVEAEDGTYDVIFLGTDSGSVLKVIALQAGGSAEPEEVVLEELQVFKVPTPITEMEISVKRQMLYVGSRLGVAQLRLHQCETYGTACAECCLARDPYCAWDGASCTHYRPSLGKRRFRRQDIRHGNPALQCLGQSQEEEAVGLVAATMVYGTEHNSTFLECLPKSPQAAVRWLLQRPGDEGPDQVKTDERVLHTERGLLFRRLSRFDAGTYTCTTLEHGFSQTVVRLALVVIVASQLDNLFPPEPKPEEPPARGGLASTPPKAWYKDILQLIGFANLPRVDEYCERVWCRGTTECSGCFRSRSRGKQARGKSWAGLELGKKMKSRVHAEHNRTPREVEAT

SEQ ID NO: 10 - DNA, 2349 bp, Homo sapiens
  CDS (1)...(2349)
atggccccctcggcctgggccatttgctggctgctagggggcctcctgctccatgggggtagctctggccccagccccggccccagtgtgccccgcctgcggctctcctaccgagacctcctgtctgccaaccgctctgccatctttctgggcccccagggctccctgaacctccaggccatgtacctagatgagtaccgagaccgcctctttctgggtggcctggacgccctctactctctgcggctggaccaggcatggccagatccccgggaggtcctgtggccaccgcagccaggacagagggaggagtgtgttcgaaagggaagagatcctttgacagagtgcgccaacttcgtgcgggtgctacagcctcacaaccggacccacctgctagcctgtggcactggggccttccagcccacctgtgccctcatcacagttggccaccgtggggagcatgtgctccacctggagcctggcagtgtggaaagtggccgggggcggtgccctcacgagcccagccgtccctttgccagcaccttcatagacggggagctgtacacgggtctcactgctgacttcctggggcgagaggccatgatcttccgaagtggaggtcctcggccagctctgcgttccgactctgaccagagtctcttgcacgacccccggtttgtgatggccgcccggatccctgagaactctgaccaggacaatgacaaggtgtacttcttcttctcggagacggtcccctcgcccgatggtggctcgaaccatgtcactgtcagccgcgtgggccgcgtctgcgtgaatgatgctgggggccagcgggtgctggtgaacaaatggagcactttcctcaaggccaggctggtctgctcggtgcccggccctggtggtgccgagacccactttgaccagctagaggatgtgttcctgctgtggcccaaggccgggaagagcctcgaggtgtacgcgctgttcagcaccgtcagtgccgtgttccagggcttcgccgtctgtgtgtaccacatggcagacatctgggaggttttcaacgggccctttgcccaccgagatgggcctcagcaccagtgggggccctatgggggcaaggtgcccttccctcgccctggcgtgtgccccagcaagatgaccgcacagccaggacggccttttggcagcaccaaggactacccagatgaggtgctgcagtttgcccgagcccaccccctcatgttctggcctgtgcggcctcgacatggccgccctgtccttgtcaagacccacctggcccagcagctacaccagatcgtggtggaccgcgtggaggcagaggatgggacctacgatgtcattttcctggggactgactcagggtctgtgctcaaagtcatcgctctccaggcagggggctcagctgaacctgaggaagtggttctggaggagctccaggtgtttaaggtgccaacacctatcaccgaaatggagatctctgtcaaaaggcaaatgctatacgtgggctctcggctgggtgtggcccagctgcggctgcaccaatgtgagacttacggcactgcctgtgcagagtgctgcctggcccgggacccatactgtgcctgggatggtgcctcctgtacccactaccgccccagccttggcaagcgccggttccgccggcaggacatccggcacggcaaccctgccctgcagtgcctgggccagagccaggaagaagaggcagtgggacttgtggcagccaccatggtctacggcacggagcacaatagcaccttcctggagtgcctgcccaagtctccccargctgctgtgcgctggctcttgcagaggccaggggatgaggggcctgaccaggtgaagacggacgagcgagtcttgcacacggagcgggggctgctgttccgcaggcttagccgtttcgatgcgggcacctacacctgcaccactctggagcatggcttctcccagactgtggtccgcctggctctggtggtgattgtggcctcacagctggacaacctgttccctccggagccaaagccagaggagcccccagcccggggaggcctggcttccaccccacccaaggcctggtacaaggacatcctgcagctcattggcttcgccaacctgccccgggtggatgagtactgtgagcgcgtgtggtgcaggggcaccacggaatgctcaggctgcttccggagccggagccggggcaagcaggccaggggcaagagctgggcagggctggagctaggcaagaagatgaagagccgggtgcatgccgagcacaatcggacgccccgggaggtggaggccacgtag

SEQ ID NO: 11 - protein, 782 aa, Homo sapiens
MAPSAWAICWLLGGLLLHGGSSGPSPGPSVPRLRLSYRDLLSANRSAIFLGPQGSLNLQAMYLDEYRDRLFLGGLDALYSLRLDQAWPDPREVLWPPQPGQREECVRKGRDPLTECANFVRVLQPHNRTHLLACGTGAFQPTCALITVGHRGEHVLHLEPGSVESGRGRCPHEPSRPFASTFIDGELYTGLTADFLGREAMIFRSGGPRPALRSDSDQSLLHDPRFVMAARIPENSDQDNDKVYFFFSETVPSPDGGSNHVTVSRVGRVCVNDAGGQRVLVNKWSTFLKARLVCSVPGPGGAETHFDQLEDVFLLWPKAGKSLEVYALFSTVSAVFQGFAVCVYHMADIWEVFNGPFAHRDGPQHQWGPYGGKVPFPRPGVCPSKMTAQPGRPFGSTKDYPDEVLQFARAHPLMFWPVRPRHGRPVLVKTHLAQQLHQIVVDRVEAEDGTYDVIFLGTDSGSVLKVIALQAGGSAEPEEVVLEELQVFKVPTPITEMEISVKRQMLYVGSRLGVAQLRLHQCETYGTACAECCLARDPYCAWDGASCTHYRPSLGKRRFRRQDIRHGNPALQCLGQSQEEEAVGLVAATMVYGTEHNSTFLECLPKSPQAAVRWLLQRPGDEGPDQVKTDERVLHTERGLLFRRLSRFDAGTYTCTTLEHGFSQTVVRLALVVIVASQLDNLFPPEPKPEEPPARGGLASTPPKAWYKDILQLIGFANLPRVDEYCERVWCRGTTECSGCFRSRSRGKQARGKSWAGLELGKKMKSRVHAEHNRTPREVEAT

SEQ ID NO: 12 - DNA, 3568 bp, Homo sapiens
acctggggaagctctggaccctgagtctctggaaggactggaggcctgagggaggcagggcaaggggaggttccctcggcatggagtcccctgatgcccctgtcccctaccccaaagcaagcctggtgagctgagatggggcatgtagatgtggggagaggctggggtgcctggaagccagatggggacaggcctgggtggaagaggctgggcagtcatctcttgctggctctatgaagtgttgccggacctcaaacacctgtctaggacatggcgccccttgggctgggaatggccctccacccttacccaggggagctggagagtctggccaaagcttcagggggctggaatatcctggaattggggcagggccagtttggaaggtctctgctgtgggcagtggaggggcagagaacaaggcagagcccagctaggcccctacccagcccatcaactttaacctctgatccctgacctcccttccaggctctctccccacttgtcactttgctggagcctggggacctgcatttgtggacatctctgtacacatggcctgtgccctagctgggaaggtcttcccaatggggagctggccagtgtggcacaaaagcctgcactgggccaacaaggtggaaggagaagcggcaggtggacggcaaggccccagcctccttctctcctccgcccctcttcccgcccaggactgggtggagccactgccttataagtggtggcctggtggcagcagagcaaactacaaccggcggccagcgggaccagagggcggctctgcaggcaggcggcagcggtgccctcagttccccagcatggccccctcggcctgggccatttgctggctgctagggggcctcctgctccatgggggtagctctggccccagccccggccccagtgtgccccgcctgcggctctcctaccgagacctcctgtctgccaaccgctctgccatctttctgggcccccagggctccctgaacctccaggccatgtacctagatgagtaccgagaccgcctctttctgggtggcctggacgccctctactctctgcggctggaccaggcatggccagatccccgggaggtcctgtggccaccgcagccaggacagagggaggagtgtgttcgaaagggaagagatcctttgacagagtgcgccaacttcgtgcgggtgctacagcctcacaaccggacccacctgctagcctgtggcactggggccttccagcccacctgtgccctcatcacagttggccaccgtggggagcatgtgctccacctggagcctggcagtgtggaaagtggccgggggcggtgccctcacgagcccagccgtccctttgccagcaccttcatagacggggagctgtacacgggtctcactgctgacttcctggggcgagaggccatgatcttccgaagtggaggtcctcggccagctctgcgttccgactctgaccagagtctcttgcacgacccccggtttgtgatggccgcccggatccctgagaactctgaccaggacaatgacaaggtgtacttcttcttctcggagacggtcccctcgcccgatggtggctcgaaccatgtcactgtcagccgcgtgggccgcgtctgcgtgaatgatgctgggggccagcgggtgctggtgaacaaatggagcactttcctcaaggccaggctggtctgctcggtgcccggccctggtggtgccgagacccactttgaccagctagaggatgtgttcctgctgtggcccaaggccgggaagagcctcgaggtgtacgcgctgttcagcaccgtcagtgccgtgttccagggcttcgccgtctgtgtgtaccacatggcagacatctgggaggttttcaacgggccctttgcccaccgagatgggcctcagcaccagtgggggccctatgggggcaaggtgcccttccctcgccctggcgtgtgccccagcaagatgaccgcacagccaggacggccttttggcagcaccaaggactacccagatgaggtgctgcagtttgcccgagcccaccccctcatgttctggcctgtgcggcctcgacatggccgccctgtccttgtcaagacccacctggcccagcagctacaccagatcgtggtggaccgcgtggaggcagaggatgggacctacgatgtcattttcctggggactgactcagggtctgtgctcaaagtcatcgctctccaggcagggggctcagctgaacctgaggaagtggttctggaggagctccaggtgtttaaggtgccaacacctatcaccgaaatggagatctctgtcaaaaggcaaatgctatacgtgggctctcggctgggtgtggcccagctgcggctgcaccaatgtgagacttacggcactgcctgtgcagagtgctgcctggcccgggacccatactgtgcctgggatggtgcctcctgtacccactaccgccccagccttggcaagcgccggttccgccggcaggacatccggcacggcaaccctgccctgcagtgcctgggccagagccaggaagaagaggcagtgggacttgtggcagccaccatggtctacggcacggagcacaatagcaccttcctggagtgcctgcccaagtctccccaggctgctgtgcgctggctcttgcagaggccaggggatgaggggcctgaccaggtgaagacggacgagcgagtcttgcacacggagcgggggctgctgttccgcaggcttagccgtttcgatgcgggcacctacacctgcaccactctggagcatggcttctcccagactgtggtccgcctggctctggtggtgattgtggcctcacagctggacaacctgttccctccggagccaaagccagaggagcccccagcccggggaggcctggcttccaccccacccaaggcctggtacaaggacatcctgcagctcattggcttcgccaacctgccccgggtggatgagtactgtgagcgcgtgtggtgcaggggcaccacggaatgctcaggctgcttccggagccggagccggggcaagcaggccaggggcaagagctgggcagggctggagctaggcaagaagatgaagagccgggtgcatgccgagcacaatcggacgccccgggaggtggaggccacgtagaagggggcagaggaggggtggtcaggatgggctggggggcccactagcagcccccagcatctcccacccacccagctagggcagaggggtcaggatgtctgtttgcctcttagagacaggtgtctctgcccccacaccgctactggggtctaatggaggggctgggttcttgaagcctgttccctgcccttctctgtgctcttagacccagctggagccagcaccctctggctgctggcagccccaagggatctgccatttgttctcagagatggcctggcttccgcaacacatttccgggtgtgcccagaggcaagagggttgggtggttctttcccagcctacagaacaatggccattctgagtgaccctcaaagtgggtgtgt

SEQ ID NO: 13 - DNA, 276 bp, Homo sapiens
  CDS (1)...(276)
atgacagacttgtccgagctaccatcgaagtcttgggtctgcacgcaaaggatggaatcccccatctccattcccaaaagtttccctacgggagcctggtgttgtctcctccggaactgtcctmgcggctgcctgtttttccctagccatggttactgcctgcgggggattcagcctgtgaaggcagtcaaggcagttcaccactgtcatcaaacctacacccctgtgtgcaygcgcacacacacttgtaacccagtggcacaatgcaggaattag

SEQ ID NO: 14 - protein, 91 aa, Homo sapiens
  VARIANT (1)...(91): Xaa = Any Amino Acid
MTDLSELPSKSWVCTQRMESPISIPKSFPTGAWCCLLRNCPXGCLFFPSHGYCLRGIQPVKAVKAVHHCHQTYTPVCXRTHTCNPVAQCRN

SEQ ID NO: 15 - DNA, 270 bp, Homo sapiens
  CDS (1)...(270)
atgactgaattgaatgattctaagtgttacgcaattagcaaaagatgtctaacaatcactttggggatccggaacaagtgtggtcccagttcaactgtgttcctgtcagaatacctctgtggtgactctctcctactacgtcagttccagaagcgggggatggaagacccctgttgtggccagcagtgctgttccatgtcctttccagtgcactgtctcctctgctgctcagggtcaggatgcccacacactcctgcgcccagcttctga

SEQ ID NO: 16 - protein, 89 aa, Homo sapiens
MTELNDSKCYAISKRCLTITLGIRNKCGPSSTVFLSEYLCGDSLLLRQFQKRGMEDPCCGQQCCSMSFPVHCLLCCSGSGCPHTPAPSF

SEQ ID NO: 17 - DNA, 2024 bp, Homo sapiens
agggttagctcatttttcatcagggagatacatttctttcccaaagctgtgatctaggagagttgccaagcagctagagttaaaaaaaatacacaaaaaccgcaaacaacataattctttcatgtggcattctctcctttgtgctcatcatgcttgatgatcgctgaccagttctaaaatagagtccatgggttcaagcctttggctgtttctgggctcttagacacttagtctcacagcttgatcccaaataattgtccactgacagtattcaaagggcggaggtgcaagactctctttttgtaaggtgggactaaattggaaaactattgaaattcatgaaagatttctcaggtttacttttgtgagcttagcacatgtagaacatttacaaagctttaatgtccatatctgaacatgtgtgctcttttaatcgaaagtcctcatttttttttttttttagatccctgcctatctctttgacaggatctatagtggtggcttaaaacctaaatgtggtctttcttttttgctttccagatctttggcagggctagtatgaaacaatccaattaacacaacttgatttcatctgctttattttgtgattatctcttggtggccagagccagccctctggaccagaggaaacaatgatgcccacctggtcaatggaggttattttagttgtgagtactcgaatttgtcttgtgtgtaagattccttaaagaagctgttgtttttctgtgacctaaataagatactgttcccaggtaactttgggtctaaaaaatgacctctttcttggggcctttcagatgactgaattgaatgattctaagtgttacgcaattagcaaaagatgtctaacaatcactttggggatccggaacaagtgtggtcccagttcaactgtgttcctgtcagaatacctctgtggtgactctctcctactacgtcagttccagaagcgggggatggaagacccctgttgtggccagcagtgctgttccatgtcctttccagtgcactgtctcctctgctgctcagggtcaggatgcccacacactcctgcgcccagcttctgagtctcagtctccccttctaggtcgcctttgcagcttcactctttgtttgctctgtggaagtttctcgtttaagctctgttgagtgaaaagagtgatcacaaccccattggcattttgttttctgtttctgcgttaattcacctaggacaatggcctccagctgcatccatactgctgcaaatgacatgatttcactcttttttatggctgtgtagttccatggtatatacatatatcacattttctttacccagttcaccattgatgggcacctgggtttatcccatgtccttgctattgtgaatagtgctgtgatgaacatgtacatgcatatgtctttttggtaaaatgatttattttccttcgggggtatatgcagtaatgggattgctgggtcaagtggtagttttatttttagttctttagaaatttccaaatgctttccatagggactgagctaatttacttttccaccaacagtgtataagtgttccctttgtatgcattctcaccaacatctattttttgactttttagtaatagccattctgactggtgtgagatgatatctcatttggttttggtttacattttcctgacaattagtgatactaagcatttttcatgtttgttggctgcttgtatgtcttctttttaagaagtgactgttcatgtcatttgcccactttttaatttggttgttttttgcttgttgaattatttaagttacttatagattctgagtgtttgccctttgtaggacgtatagtttgcaaatattttctcccattctgcaggttgtctgtttagtttaatagtttctttttttgctgtgcagaaagtctttagtttaattaggtcccatttatcaatttttgtttttgttgcaattgcttttgagggttcagttttattattctgtatatggatggtcag

SEQ ID NO: 18 - DNA, 3963 bp, Homo sapiens
  CDS (1)...(3963)
atgcaagacgacagcatagaagcttctacttccatatctcagcttctaagagagagctatttagctgaaaccagacatcggggaaacaatgagaggagtcgagcggagccctcctccaacccttgccatttcggcagtccttctggggccgctgaaggaggcggaggccaagatgaccttccagatctttcagcctttctgagccaagaagaattagacgaaagtgtcaatttggcaagactggccatcaattacgaccctttggagaaggcagatgaaactcaagctagaaaacgactttctcctgatcagatgaaacactcacctaatttaagttttgagcctaacttctgccaggataaccctcgaagtcccaccagctctaaagaaagcccccaggaggcaaaaaggccacagtattgttctgaaacccagtccaaaaaagtatttttaaataaggctgccgacttcattgaagagctatcctcccttttcaaatcccacagctccaaaaggattagacctcgtgcctgcaaaaaccacaagagtaaactggaatctcaaaacaaagttatgcaggaaaacagctccagtttctcagatctgtcagaaagacgagaaagatcttctgttcccatccctatccctgcggataccagggataatgaagtgaatcacgccctggaacagcaggaagccaagaggcgtgaagcggagcaggctgccagtgaggcggctggtggagacactacaccagggtcttccccttcatctctgtactatgaagaacctctggggcaacctccccggttcactcaaaagttacggagcagagaagttccagaaggaactcgagtacagttggattgcatagtggtaggaattccaccacctcaagtaaggtggtactgtgaaggcaaggagcttgaaaattccccagatattcacatcgtccaggcaggaaatctgcactcactgaccattgcggaagcctttgaagaggacacaggacgctattcctgctttgcttctaacatctatgggacagattcgacttctgctgagatttatatagaaggggtttcttcttctgactcagaaggcgaccctaacaaggaagagatgaatcgaatccagaagccaaatgaggtgtcatctcctcccactacctctgcagtcattcctccagcagtaccccaagcccagcatttggtggcccaacctcgtgtggcaaccatccagcagtgtcagagccccaccaattacttgcagggattggatggaaaacctatcattgcagctcctgtgtttacaaagatgctacaaaatttgtcagcttctgagggtcagctggttgtctttgaatgcagagtaaaaggagctccatctcctaaggttgagtggtatagagaagggactttaatagaagattctccagattttaggattttacagaaaaaacctcgatccatggcagagccagaggagatttgcaccttggtcattgctgaggtgtttgcagaagattctgggtgcttcacatgtactgcaagcaacaaatacggcacagtgtcaagcattgcacagctgcacgtgagaggaaatgaggacctcagcaacaacgggtctcttcactcagccaactcyaccaccaacctggcagctattgagccacagccctccccaccccactcagagcctccatctgtggaacaaccccccaaacccaaactcgagggggttctggtgaaccacaatgagccccggtccagctccaggattgggcttcgtgtgcacttcaacctgcctgaagatgacaaaggaagtgaagcatcctccgaggctggtgtggtgaccaccagacagaccaggcccgattctttscaggagaggttcaacggacaggcaacaaaaaccccagagccttctttccccgtgaaagagccccctccagttctggccaaacccaaacttgattccactcagttacaacagcttcataaccaagtcttactggaacaacaccaattgcaaaacccacctccttcatctcctaaggagtttcctttcarcatgactgttttgaactccaatgctcccccagcggtgacaacatccartaagcaggtgaaggctccttcatcacagacgttcagcttggcccggccgaagtatttcttcccctccacgaacaccaccgcagcaactgtggccccttccagctctccggtgttcactttgagcagcactcctcaaactattcagaggacagtgagcaaagaaagcctcttagtgtctcacccctctgtgcaaaccaaatctccaggagggctttccatccaaaatgagccactcccaccaggcccaacagaaccracaccaccaccattcacattttccatccccagcggaaaccagtttcagccccgctgtgtgtccccaattcctgtctctcctaccagccggattcagaacccagtggctttcctcagctctgttctgccttctctccctgccatcccacccacaaatgccatggrgctgcctagaagtgcaccatccatgccatcccagggattagcgaagaaaaatacaaagtctcctcaaccagtgaatgatgataacattcgtgaaactaagaacgcagtgattcgagacttggggaaaaaaataactttcagtgatgtcagaccaaaccagcaggagtacaaaatttcaagctttgagcagaggctgatgaatgaaatagagtttcgcttggaacgtactcctgttgatgaatcagatgatgaaattcaacatgatgagatccccacgggcaagtgtattgctcccatctttgacaagagactcaagcacttccgggtcacagaaggctctccagtcacattcacctgcaaaattgttgggatacctgttccaaaggtttactggttcaaagatgggaagcagatttctaagagaaatgagcactgcaaaatgaggcgagaaggagatgggacatgctctctgcacattgaatccactaccagtgatgacgatggcaactacaccatcatggcagccaacccccaggggagaatcagctgttctggccacttgatggtacaaagtttgcccattcgcagtcggctaacctctgctggtcagtctcacaggggaagatcccgagtgcaagaaagagacaaagagcccctacaggaacgctttttccgaccacatttcctgcaggctcctggggatatggtagctcatgaggggcgcctctgtcggctggactgtaaggtgagtggtttaccgcccccggagctgacatggctactcaatggccaacctgtgctaccagatgcctcccacaagatgctggtcagggagaccggagtccactctctgctcattgacccactcactcagcgcgacgcagggacctataagtgcatcgctaccaacaaaaccgggcagaattcttttagtctggagctctctgtagtagccaaagaggtgaagaaagcacctgtgatcctggagaaactacagaactgcggtgttcccgaaggccaccccgtgagactggagtgccgcgtgataggcatgcccccacctgtgttctactggaagaaagacaatgagaccatcccttgcaccagagagaggatcagtatgcaccaggacacaacagggtatgcctgccttctcattcagccagccaagaaatcagacgctggatggtacacgttgtcagccaagaatgaagccggcatcgtgtcgtgcactgccaggctggatatatacgctcagtggcaccatcagatcccaccgcccatgtctgtccggcccagtggcagtcgctacggatctctcaccagtaaaggacttgacatattttctgccttttcctccatggaaagcacgatggtgtattcatgctcttctcggagtgtagtggagagtgatgaactttaa

SEQ ID NO: 19 - protein, 1320 aa, Homo sapiens
  VARIANT (1)...(1320): Xaa = Any Amino Acid
MQDDSIEASTSISQLLRESYLAETRHRGNNERSRAEPSSNPCHFGSPSGAAEGGGGQDDLPDLSAFLSQEELDESVNLARLAINYDPLEKADETQARKRLSPDQMKHSPNLSFEPNFCQDNPRSPTSSKESPQEAKRPQYCSETQSKKVFLNKAADFIEELSSLFKSHSSKRIRPRACKNHKSKLESQNKVMQENSSSFSDLSERRERSSVPIPIPADTRDNEVNHALEQQEAKRREAEQAASEAAGGDTTPGSSPSSLYYEEPLGQPPRFTQKLRSREVPEGTRVQLDCIVVGIPPPQVRWYCEGKELENSPDIHIVQAGNLHSLTIAEAFEEDTGRYSCFASNIYGTDSTSAEIYIEGVSSSDSEGDPNKEEMNRIQKPNEVSSPPTTSAVIPPAVPQAQHLVAQPRVATIQQCQSPTNYLQGLDGKPIIAAPVFTKMLQNLSASEGQLVVFECRVKGAPSPKVEWYREGTLIEDSPDFRILQKKPRSMAEPEEICTLVIAEVFAEDSGCFTCTASNKYGTVSSIAQLHVRGNEDLSNNGSLHSANXTTNLAAIEPQPSPPHSEPPSVEQPPKPKLEGVLVNHNEPRSSSRIGLRVHFNLPEDDKGSEASSEAGVVTTRQTRPDSXQERFNGQATKTPEPSFPVKEPPPVLAKPKLDSTQLQQLHNQVLLEQHQLQNPPPSSPKEFPFXMTVLNSNAPPAVTTSXKQVKAPSSQTFSLARPKYFFPSTNTTAATVAPSSSPVFTLSSTPQTIQRTVSKESLLVSHPSVQTKSPGGLSIQNEPLPPGPTEXTPPPFTFSIPSGNQFQPRCVSPIPVSPTSRIQNPVAFLSSVLPSLPAIPPTNAMXLPRSAPSMPSQGLAKKNTKSPQPVNDDNIRETKNAVIRDLGKKITFSDVRPNQQEYKISSFEQRLMNEIEFRLERTPVDESDDEIQHDEIPTGKCIAPIFDKRLKHFRVTEGSPVTFTCKIVGIPVPKVYWFKDGKQISKRNEHCKMRREGDGTCSLHIESTTSDDDGNYTIMAANPQGRISCSGHLMVQSLPIRSRLTSAGQSHRGRSRVQERDKEPLQERFFRPHFLQAPGDMVAHEGRLCRLDCKVSGLPPPELTWLLNGQPVLPDASHKMLVRETGVHSLLIDPLTQRDAGTYKCIATNKTGQNSFSLELSVVAKEVKKAPVILEKLQNCGVPEGHPVRLECRVIGMPPPVFYWKKDNETIPCTRERISMHQDTTGYACLLIQPAKKSDAGWYTLSAKNEAGIVSCTARLDIYAQWHHQIPPPMSVRPSGSRYGSLTSKGLDIFSAFSSMESTMVYSCSSRSVVESDEL

SEQ ID NO: 20 - DNA, 1134 bp, Homo sapiens
  CDS (1)...(1134)
atgcaagacgacagcatagaagcttctacttccatatctcagcttctaagagagagctatttagctgaaaccagacatcggggaaacaatgagaggagtcgagcggagccctcctccaacccttgccatttcggcagtccttctggggccgctgaaggaggcggaggccaagatgaccttccagatctttcagcctttctgagccaagaagaattagacgaaagtgtcaatttggcaagactggccatcaattacgaccctttggagaaggcagatgaaactcaagctagaaaacgactttctcctgatcagatgaaacactcacctaatttaagttttgagcctaacttctgccaggataaccctcgaagtcccaccagctctaaagaaagcccccaggaggcaaaaaggccacagtattgttctgaaacccagtccaaaaaagtatttttaaataaggctgccgacttcattgaagagctatcctcccttttcaaatcccacagctccaaaaggattagacctcgtgcctgcaaaaaccacaagagtaaactggaatctcaaaacaaagttatgcaggaaaacagctccagtttctcagatctgtcagaaagacgagaaagatcttctgttcccatccctatccctgcggataccagggataatgaagtgaatcacgccctggaacagcaggaagccaagaggcgtgaagcggagcaggctgccagtgaggcggctggtggagacactacaccagggtcttccccttcatctctgtactatgaagaacctctggggcaacctccccggttcactcaaaagttacggagcagagaagttccagaaggaactcgagtacagttggattgcatagtggtaggaattccaccacctcaagtaaggtggtactgtgaaggcaaggagcttgaaaattccccagatattcacatcgtccaggcaggaaatctgcactcactgaccattgcggaagcctttgaagaggacacaggacgctattcctgctttgcttctaacatctatgggacagattcgacttctgctgagatttatatagaaggggtttcttcttctgactcagaaggcgaccctaacaaggaagagatgaatcggtaa

SEQ ID NO: 21 - protein, 377 aa, Homo sapiens
MQDDSIEASTSISQLLRESYLAETRHRGNNERSRAEPSSNPCHFGSPSGAAEGGGGQDDLPDLSAFLSQEELDESVNLARLAINYDPLEKADETQARKRLSPDQMKHSPNLSFEPNFCQDNPRSPTSSKESPQEAKRPQYCSETQSKKVFLNKAADFIEELSSLFKSHSSKRIRPRACKNHKSKLESQNKVMQENSSSFSDLSERRERSSVPIPIPADTRDNEVNHALEQQEAKRREAEQAASEAAGGDTTPGSSPSSLYYEEPLGQPPRFTQKLRSREVPEGTRVQLDCIVVGIPPPQVRWYCEGKELENSPDIHIVQAGNLHSLTIAEAFEEDTGRYSCFASNIYGTDSTSAEIYIEGVSSSDSEGDPNKEEMNR

SEQ ID NO: 22 - DNA, 1260 bp, Homo sapiens
  CDS (1)...(1260)
atgcaagacgacagcatagaagcttctacttccatatctcagcttctaagagagagctatttagctgaaaccagacatcggggaaacaatgagaggagtcgagcggagccctcctccaacccttgccatttcggcagtccttctggggccgctgaaggaggcggaggccaagatgaccttccagatctttcagcctttctgagccaagaagaattagacgaaagtgtcaatttggcaagactggccatcaattacgaccctttggagaaggcagatgaaactcaagctagaaaacgactttctcctgatcagatgaaacactcacctaatttaagttttgagcctaacttctgccaggataaccctcgaagtcccaccagctctaaagaaagcccccaggaggcaaaaaggccacagtattgttctgaaacccagtccaaaaaagtatttttaaataaggctgccgacttcattgaagagctatcctcccttttcaaatcccacagctccaaaaggattagacctcgtgcctgcaaaaaccacaagagtaaactggaatctcaaaacaaagttatgcaggaaaacagctccagtttctcagatctgtcagaaagacgagaaagatcttctgttcccatccctatccctgcggataccagggataatgaagtgaatcacgccctggaacagcaggaagccaagaggcgtgaagcggagcaggctgccagtgaggcggctggtggagacactacaccagggtcttccccttcatctctgtactatgaagaacctctggggcaacctccccggttcactcaaaagttacggagcagagaagttccagaaggaactcgagtacagttggattgcatagtggtaggaattccaccacctcaagtaaggtggtactgtgaaggcaaggagcttgaaaattccccagatattcacatcgtccaggcaggaaatctgcactcactgaccattgcggaagcctttgaagaggacacaggacgctattcctgctttgcttctaacatctatgggacagattcgacttctgctgagatttatatagaaggggtttcttcttctgactcagaaggcgaccctaacaaggaagagatgaatcgtgtcagagccccaccaattacttgcagggattggatggaaaacctatcattgcagctcctgtgtttacaaagatgctacaaaatttgtcagcttctgagggtcagctggttgtctttgaatgcagagtaa

SEQ ID NO: 23 - protein, 419 aa, Homo sapiens
MQDDSIEASTSISQLLRESYLAETRHRGNNERSRAEPSSNPCHFGSPSGAAEGGGGQDDLPDLSAFLSQEELDESVNLARLAINYDPLEKADETQARKRLSPDQMKHSPNLSFEPNFCQDNPRSPTSSKESPQEAKRPQYCSETQSKKVFLNKAADFIEELSSLFKSHSSKRIRPRACKNHKSKLESQNKVMQENSSSFSDLSERRERSSVPIPIPADTRDNEVNHALEQQEAKRREAEQAASEAAGGDTTPGSSPSSLYYEEPLGQPPRFTQKLRSREVPEGTRVQLDCIVVGIPPPQVRWYCEGKELENSPDIHIVQAGNLHSLTIAEAFEEDTGRYSCFASNIYGTDSTSAEIYIEGVSSSDSEGDPNKEEMNRVRAPPITCRDWMENLSLQLLCLQRCYKICQLLRVSWLSLNAE

SEQ ID NO: 24 - DNA, 1206 bp, Homo sapiens
  CDS (1)...(1206)
atgcaagacgacagcatagaagcttctacttccatatctcagcttctaagagagagctatttagctgaaaccagacatcggggaaacaatgagaggagtcgagcggagccctcctccaacccttgccatttcggcagtccttctggggccgctgaaggaggcggaggccaagatgaccttccagatctttcagcctttctgagccaagaagaattagacgaaagtgtcaatttggcaagactggccatcaattacgaccctttggagaaggcagatgaaactcaagctagaaaacgactttctcctgatcagatgaaacactcacctaatttaagttttgagcctaacttctgccaggataaccctcgaagtcccaccagctctaaagaaagcccccaggaggcaaaaaggccacagtattgttctgaaacccagtccaaaaaagtatttttaaataaggctgccgacttcattgaagagctatcctcccttttcaaatcccacagctccaaaaggattagacctcgtgcctgcaaaaaccacaagagtaaactggaatctcaaaacaaagttatgcaggaaaacagctccagtttctcagatctgtcagaaagacgagaaagatcttctgttcccatccctatccctgcggataccagggataatgaagtgaatcacgccctggaacagcaggaagccaagaggcgtgaagcggagcaggctgccagtgaggcggctggtggagacactacaccagggtcttccccttcatctctgtactatgaagaacctctggggcaacctccccggttcactcaaaagttacggagcagagaagttccagaaggaactcgagtacagttggattgcatagtggtaggaattccaccacctcaagtaaggtggtactgtgaaggcaaggagcttgaaaattccccagatattcacatcgtccaggcaggaaatctgcactcactgaccattgcggaagcctttgaagaggacacaggacgctattcctgctttgcttctaacatctatgggacagattcgacttctgctgagatttatatagaaggggtttcttcttctgactcagaaggcgaccctaacaaggaagagatgaatcgtgtcagagccccaccaattacttgcagggattggatggaaaacctatcattgcagctcctgtgtttacaaaggtaa

SEQ ID NO: 25 - protein, 401 aa, Homo sapiens
MQDDSIEASTSISQLLRESYLAETRHRGNNERSRAEPSSNPCHFGSPSGAAEGGGGQDDLPDLSAFLSQEELDESVNLARLAINYDPLEKADETQARKRLSPDQMKHSPNLSFEPNFCQDNPRSPTSSKESPQEAKRPQYCSETQSKKVFLNKAADFIEELSSLFKSHSSKRIRPRACKNHKSKLESQNKVMQENSSSFSDLSERRERSSVPIPIPADTRDNEVNHALEQQEAKRREAEQAASEAAGGDTTPGSSPSSLYYEEPLGQPPRFTQKLRSREVPEGTRVQLDCIVVGIPPPQVRWYCEGKELENSPDIHIVQAGNLHSLTIAEAFEEDTGRYSCFASNIYGTDSTSAEIYIEGVSSSDSEGDPNKEEMNRVRAPPITCRDWMENLSLQLLCLQR

SEQ ID NO: 26 - DNA, 1380 bp, Homo sapiens
  CDS (1)...(1380)
atgcaagacgacagcatagaagcttctacttccatatctcagcttctaagagagagctatttagctgaaaccagacatcggggaaacaatgagaggagtcgagcggagccctcctccaacccttgccatttcggcagtccttctggggccgctgaaggaggcggaggccaagatgaccttccagatctttcagcctttctgagccaagaagaattagacgaaagtgtcaatttggcaagactggccatcaattacgaccctttggagaaggcagatgaaactcaagctagaaaacgactttctcctgatcagatgaaacactcacctaatttaagttttgagcctaacttctgccaggataaccctcgaagtcccaccagctctaaagaaagcccccaggaggcaaaaaggccacagtattgttctgaaacccagtccaaaaaagtatttttaaataaggctgccgacttcattgaagagctatcctcccttttcaaatcccacagctccaaaaggattagacctcgtgcctgcaaaaaccacaagagtaaactggaatctcaaaacaaagttatgcaggaaaacagctccagtttctcagatctgtcagaaagacgagaaagatcttctgttcccatccctatccctgcggataccagggataatgaagtgaatcacgccctggaacagcaggaagccaagaggcgtgaagcggagcaggctgccagtgaggcggctggtggagacactacaccagggtcttccccttcatctctgtactatgaagaacctctggggcaacctccccggttcactcaaaagttacggagcagagaagttccagaaggaactcgagtacagttggattgcatagtggtaggaattccaccacctcaagtaaggtggtactgtgaaggcaaggagcttgaaaattccccagatattcacatcgtccaggcaggaaatctgcactcactgaccattgcggaagcctttgaagaggacacaggacgctattcctgctttgcttctaacatctatgggacagattcgacttctgctgagatttatatagaaggggtttcttcttctgactcagaaggcgaccctaacaaggaagagatgaatcgaatccagaagccaaatgaggtgtcatctcctcccactacctctgcagtcattcctccagcagtaccccaagcccagcatttggtggcccaacctcgtgtggcaaccatccagcagtgtcagagccccaccaattacttgcagggattggatggaaaacctatcattgcagctcctgtgtttacaaaggtaataaaaatattacttctttctgtcatggctttaaagataccacagcacccaaagttatag

SEQ ID NO: 27 - protein, 459 aa, Homo sapiens
MQDDSIEASTSISQLLRESYLAETRHRGNNERSRAEPSSNPCHFGSPSGAAEGGGGQDDLPDLSAFLSQEELDESVNLARLAINYDPLEKADETQARKRLSPDQMKHSPNLSFEPNFCQDNPRSPTSSKESPQEAKRPQYCSETQSKKVFLNKAADFIEELSSLFKSHSSKRIRPRACKNHKSKLESQNKVMQENSSSFSDLSERRERSSVPIPIPADTRDNEVNHALEQQEAKRREAEQAASEAAGGDTTPGSSPSSLYYEEPLGQPPRFTQKLRSREVPEGTRVQLDCIVVGIPPPQVRWYCEGKELENSPDIHIVQAGNLHSLTIAEAFEEDTGRYSCFASNIYGTDSTSAEIYIEGVSSSDSEGDPNKEEMNRIQKPNEVSSPPTTSAVIPPAVPQAQHLVAQPRVATIQQCQSPTNYLQGLDGKPIIAAPVFTKVIKILLLSVMALKIPQHPKL

SEQ ID NO: 28 - DNA, 1711 bp, Homo sapiens
  CDS (1)...(1711)
atgcaagacgacagcatagaagcttctacttccatatctcagcttctaagagagagctatttagctgaaaccagacatcggggaaacaatgagaggagtcgagcggagccctcctccaacccttgccatttcggcagtccttctggggccgctgaaggaggcggaggccaagatgaccttccagatctttcagcctttctgagccaagaagaattagacgaaagtgtcaatttggcaagactggccatcaattacgaccctttggagaaggcagatgaaactcaagctagaaaacgactttctcctgatcagatgaaacactcacctaatttaagttttgagcctaacttctgccaggataaccctcgaagtcccaccagctctaaagaaagcccccaggaggcaaaaaggccacagtattgttctgaaacccagtccaaaaaagtatttttaaataaggctgccgacttcattgaagagctatcctcccttttcaaatcccacagctccaaaaggattagacctcgtgcctgcaaaaaccacaagagtaaactggaatctcaaaacaaagttatgcaggaaaacagctccagtttctcagatctgtcagaaagacgagaaagatcttctgttcccatccctatccctgcggataccagggataatgaagtgaatcacgccctggaacagcaggaagccaagaggcgtgaagcggagcaggctgccagtgaggcggctggtggagacactacaccagggtcttccccttcatctctgtactatgaagaacctctggggcaacctccccggttcactcaaaagttacggagcagagaagttccagaaggaactcgagtacagttggattgcatagtggtaggaattccaccacctcaagtaaggtggtactgtgaaggcaaggagcttgaaaattccccagatattcacatcgtccaggcaggaaatctgcactcactgaccattgcggaagcctttgaagaggacacaggacgctattcctgctttgcttctaacatctatgggacagattcgacttctgctgagatttatatagaaggggtttcttcttctgactcagaaggcgaccctaacaaggaagagatgaatcgaatccagaagccaaatgaggtgtcatctcctcccactacctctgcagtcattcctccagcagtaccccaagcccagcatttggtggcccaacctcgtgtggcaaccatccagcagtgtcagagccccaccaattacttgcagggattggatggaaaacctatcattgcagctcctgtgtttacaaagatgctacaaaatttgtcagcttctgagggtcagctggttgtctttgaatgcagagtaaaaggagctccatctcctaaggttgagtggtatagagaagggactttaatagaagattctccagattttaggattttacagaaaaaacctcgatccatggcagagccagaggagatttgcaccttggtcattgctgaggtgtttgcagaagattctgggtgcttcacatgtactgcaagcaacaaatacggcacagtgtcaagcattgcacagctgcacgtgagaggaaatgaggacctcagcaacaacgggtctcttcactcagccaactcyaccaccaacctggcagctatttaccctatagcaccccctctaccccctctagagccaaaaaaaa

SEQ ID NO: 29 - protein, 570 aa, Homo sapiens
  VARIANT (1)...(570): Xaa = Any Amino Acid
MQDDSIEASTSISQLLRESYLAETRHRGNNERSRAEPSSNPCHFGSPSGAAEGGGGQDDLPDLSAFLSQEELDESVNLARLAINYDPLEKADETQARKRLSPDQMKHSPNLSFEPNFCQDNPRSPTSSKESPQEAKRPQYCSETQSKKVFLNKAADFIEELSSLFKSHSSKRIRPRACKNHKSKLESQNKVMQENSSSFSDLSERRERSSVPIPIPADTRDNEVNHALEQQEAKRREAEQAASEAAGGDTTPGSSPSSLYYEEPLGQPPRFTQKLRSREVPEGTRVQLDCIVVGIPPPQVRWYCEGKELENSPDIHIVQAGNLHSLTIAEAFEEDTGRYSCFASNIYGTDSTSAEIYIEGVSSSDSEGDPNKEEMNRIQKPNEVSSPPTTSAVIPPAVPQAQHLVAQPRVATIQQCQSPTNYLQGLDGKPIIAAPVFTKMLQNLSASEGQLVVFECRVKGAPSPKVEWYREGTLIEDSPDFRILQKKPRSMAEPEEICTLVIAEVFAEDSGCFTCTASNKYGTVSSIAQLHVRGNEDLSNNGSLHSANXTTNLAAIYPIAPPLPPLEPKK

SEQ ID NO: 30 - DNA, 2265 bp, Homo sapiens
  CDS (1)...(2265)
atgcaagacgacagcatagaagcttctacttccatatctcagcttctaagagagagctatttagctgaaaccagacatcggggaaacaatgagaggagtcgagcggagccctcctccaacccttgccatttcggcagtccttctggggccgctgaaggaggcggaggccaagatgaccttccagatctttcagcctttctgagccaagaagaattagacgaaagtgtcaatttggcaagactggccatcaattacgaccctttggagaaggcagatgaaactcaagctagaaaacgactttctcctgatcagatgaaacactcacctaatttaagttttgagcctaacttctgccaggataaccctcgaagtcccaccagctctaaagaaagcccccaggaggcaaaaaggccacagtattgttctgaaacccagtccaaaaaagtatttttaaataaggctgccgacttcattgaagagctatcctcccttttcaaatcccacagctccaaaaggattagacctcgtgcctgcaaaaaccacaagagtaaactggaatctcaaaacaaagttatgcaggaaaacagctccagtttctcagatctgtcagaaagacgagaaagatcttctgttcccatccctatccctgcggataccagggataatgaagtgaatcacgccctggaacagcaggaagccaagaggcgtgaagcggagcaggctgccagtgaggcggctggtggagacactacaccagggtcttccccttcatctctgtactatgaagaacctctggggcaacctccccggttcactcaaaagttacggagcagagaagttccagaaggaactcgagtacagttggattgcatagtggtaggaattccaccacctcaagtaaggtggtactgtgaaggcaaggagcttgaaaattccccagatattcacatcgtccaggcaggaaatctgcactcactgaccattgcggaagcctttgaagaggacacaggacgctattcctgctttgcttctaacatctatgggacagattcgacttctgctgagatttatatagaaggggtttcttcttctgactcagaaggcgaccctaacaaggaagagatgaatcgaatccagaagccaaatgaggtgtcatctcctcccactacctctgcagtcattcctccagcagtaccccaagcccagcatttggtggcccaacctcgtgtggcaaccatccagcagtgtcagagccccaccaattacttgcagggattggatggaaaacctatcattgcagctcctgtgtttacaaagatgctacaaaatttgtcagcttctgagggtcagctggttgtctttgaatgcagagtaaaaggagctccatctcctaaggttgagtggtatagagaagggactttaatagaagattctccagattttaggattttacagaaaaaacctcgatccatggcagagccagaggagatttgcaccttggtcattgctgaggtgtttgcagaagattctgggtgcttcacatgtactgcaagcaacaaatacggcacagtgtcaagcattgcacagctgcacgtgagaggaaatgaggacctcagcaacaacgggtctcttcactcagccaactcyaccaccaacctggcagctattgagccacagccctccccaccccactcagagcctccatctgtggaacaaccccccaaacccaaactcgagggggttctggtgaaccacaatgagccccggtccagctccaggattgggcttcgtgtgcacttcaacctgcctgaagatgacaaaggaagtgaagcatcctccgaggctggtgtggtgaccaccagacagaccaggcccgattctttscaggagaggttcaacggacaggcaacaaaaaccccagagccttctttccccgtgaaagagccccctccagttctggccaaacccaaacttgattccactcagttacaacagcttcataaccaagtcttactggaacaacaccaattgcaaaacccacctccttcatctcctaaggagtttcctttcarcatgactgttttgaactccaatgctcccccagcggtgacaacatccartaagcaggtgaaggctccttcatcacagacgttcagcttggcccggccgaagtatttcttcccctccacgaacaccaccgcagcaactgtggccccttccagctctccggtgttcactttgagcagcattccccctcaaacctaa

SEQ ID NO: 31 - protein, 754 aa, Homo sapiens
  VARIANT (1)...(754): Xaa = Any Amino Acid
MQDDSIEASTSISQLLRESYLAETRHRGNNERSRAEPSSNPCHFGSPSGAAEGGGGQDDLPDLSAFLSQEELDESVNLARLAINYDPLEKADETQARKRLSPDQMKHSPNLSFEPNFCQDNPRSPTSSKESPQEAKRPQYCSETQSKKVFLNKAADFIEELSSLFKSHSSKRIRPRACKNHKSKLESQNKVMQENSSSFSDLSERRERSSVPIPIPADTRDNEVNHALEQQEAKRREAEQAASEAAGGDTTPGSSPSSLYYEEPLGQPPRFTQKLRSREVPEGTRVQLDCIVVGIPPPQVRWYCEGKELENSPDIHIVQAGNLHSLTIAEAFEEDTGRYSCFASNIYGTDSTSAEIYIEGVSSSDSEGDPNKEEMNRIQKPNEVSSPPTTSAVIPPAVPQAQHLVAQPRVATIQQCQSPTNYLQGLDGKPIIAAPVFTKMLQNLSASEGQLVVFECRVKGAPSPKVEWYREGTLIEDSPDFRILQKKPRSMAEPEEICTLVIAEVFAEDSGCFTCTASNKYGTVSSIAQLHVRGNEDLSNNGSLHSANXTTNLAAIEPQPSPPHSEPPSVEQPPKPKLEGVLVNHNEPRSSSRIGLRVHFNLPEDDKGSEASSEAGVVTTRQTRPDSXQERFNGQATKTPEPSFPVKEPPPVLAKPKLDSTQLQQLHNQVLLEQHQLQNPPPSSPKEFPFXMTVLNSNAPPAVTTSXKQVKAPSSQTFSLARPKYFFPSTNTTAATVAPSSSPVFTLSSIPPQT

SEQ ID NO: 32 - DNA, 3138 bp, Homo sapiens
  CDS (1)...(3138)
atgcttaccgtccaagtgaagacttcctctgccatagaacttccagattccttggcattcctgtggatcatcccaatgtggtactgtgaaggcaaggagcttgaaaattccccagatattcacatcgtccaggcaggaaatctgcactcactgaccattgcggaagcctttgaagaggacacaggacgctattcctgctttgcttctaacatctatgggacagattcgacttctgctgagatttatatagaaggggtttcttcttctgactcagaaggcgaccctaacaaggaagagatgaatcgaatccagaagccaaatgaggtgtcatctcctcccactacctctgcagtcattcctccagcagtaccccaagcccagcatttggtggcccaacctcgtgtggcaaccatccagcagtgtcagagccccaccaattacttgcagggattggatggaaaacctatcattgcagctcctgtgtttacaaagatgctacaaaatttgtcagcttctgagggtcagctggttgtctttgaatgcagagtaaaaggagctccatctcctaaggttgagtggtatagagaagggactttaatagaagattctccagattttaggattttacagaaaaaacctcgatccatggcagagccagaggagatttgcaccttggtcattgctgaggtgtttgcagaagattctgggtgcttcacatgtactgcaagcaacaaatacggcacagtgtcaagcattgcacagctgcacgtgagaggaaatgaggacctcagcaacaacgggtctcttcactcagccaactcyaccaccaacctggcagctattgagccacagccctccccaccccactcagagcctccatctgtggaacaaccccccaaacccaaactcgagggggttctggtgaaccacaatgagccccggtccagctccaggattgggcttcgtgtgcacttcaacctgcctgaagatgacaaaggaagtgaagcatcctccgaggctggtgtggtgaccaccagacagaccaggcccgattctttscaggagaggttcaacggacaggcaacaaaaaccccagagccttctttccccgtgaaagagccccctccagttctggccaaacccaaacttgattccactcagttacaacagcttcataaccaagtcttactggaacaacaccaattgcaaaacccacctccttcatctcctaaggagtttcctttcarcatgactgttttgaactccaatgctcccccagcggtgacaacatccartaagcaggtgaaggctccttcatcacagacgttcagcttggcccggccgaagtatttcttcccctccacgaacaccaccgcagcaactgtggccccttccagctctccggtgttcactttgagcagcactcctcaaactattcagaggacagtgagcaaagaaagcctcttagtgtctcacccctctgtgcaaaccaaatctccaggagggctttccatccaaaatgagccactcccaccaggcccaacagaaccracaccaccaccattcacattttccatccccagcggaaaccagtttcagccccgctgtgtgtccccaattcctgtctctcctaccagccggattcagaacccagtggctttcctcagctctgttctgccttctctccctgccatcccacccacaaatgccatggrgctgcctagaagtgcaccatccatgccatcccagggattagcgaagaaaaatacaaagtctcctcaaccagtgaatgatgataacattcgtgaaactaagaacgcagtgattcgagacttggggaaaaaaataactttcagtgatgtcagaccaaaccagcaggagtacaaaatttcaagctttgagcagaggctgatgaatgaaatagagtttcgcttggaacgtactcctgttgatgaatcagatgatgaaattcaacatgatgagatccccacgggcaagtgtattgctcccatctttgacaagagactcaagcacttccgggtcacagaaggctctccagtcacattcacctgcaaaattgttgggatacctgttccaaaggtttactggttcaaagatgggaagcagatttctaagagaaatgagcactgcaaaatgaggcgagaaggagatgggacatgctctctgcacattgaatccactaccagtgatgacgatggcaactacaccatcatggcagccaacccccaggggagaatcagctgttctggccacttgatggtacaaagtttgcccattcgcagtcggctaacctctgctggtcagtctcacaggggaagatcccgagtgcaagaaagagacaaagagcccctacaggaacgctttttccgaccacatttcctgcaggctcctggggatatggtagctcatgaggggcgcctctgtcggctggactgtaaggtgagtggtttaccgcccccggagctgacatggctactcaatggccaacctgtgctaccagatgcctcccacaagatgctggtcagggagaccggagtccactctctgctcattgacccactcactcagcgcgacgcagggacctataagtgcatcgctaccaacaaaaccgggcagaattcttttagtctggagctctctgtagtagccaaagaggtgaagaaagcacctgtgatcctggagaaactacagaactgcggtgttcccgaaggccaccccgtgagactggagtgccgcgtgataggcatgcccccacctgtgttctactggaagaaagacaatgagaccatcccttgcaccagagagaggatcagtatgcaccaggacacaacagggtatgcctgccttctcattcagccagccaagaaatcagacgctggatggtacacgttgtcagccaagaatgaagccggcatcgtgtcgtgcactgccaggctggatatatacgctcagtggcaccatcagatcccaccgcccatgtctgtccggcccagtggcagtcgctacggatctctcaccagtaaaggacttgacatattttctgccttttcctccatggaaagcacgatggtgtattcatgctcttctcggagtgtagtggagagtgatgaactttaa

SEQ ID NO: 33 - protein, 1045 aa, Homo sapiens
  VARIANT (1)...(1045): Xaa = Any Amino Acid
MLTVQVKTSSAIELPDSLAFLWIIPMWYCEGKELENSPDIHIVQAGNLHSLTIAEAFEEDTGRYSCFASNIYGTDSTSAEIYIEGVSSSDSEGDPNKEEMNRIQKPNEVSSPPTTSAVIPPAVPQAQHLVAQPRVATIQQCQSPTNYLQGLDGKPIIAAPVFTKMLQNLSASEGQLVVFECRVKGAPSPKVEWYREGTLIEDSPDFRILQKKPRSMAEPEEICTLVIAEVFAEDSGCFTCTASNKYGTVSSIAQLHVRGNEDLSNNGSLHSANXTTNLAAIEPQPSPPHSEPPSVEQPPKPKLEGVLVNHNEPRSSSRIGLRVHFNLPEDDKGSEASSEAGVVTTRQTRPDSXQERFNGQATKTPEPSFPVKEPPPVLAKPKLDSTQLQQLHNQVLLEQHQLQNPPPSSPKEFPFXMTVLNSNAPPAVTTSXKQVKAPSSQTFSLARPKYFFPSTNTTAATVAPSSSPVFTLSSTPQTIQRTVSKESLLVSHPSVQTKSPGGLSIQNEPLPPGPTEXTPPPFTFSIPSGNQFQPRCVSPIPVSPTSRIQNPVAFLSSVLPSLPAIPPTNAMXLPRSAPSMPSQGLAKKNTKSPQPVNDDNIRETKNAVIRDLGKKITFSDVRPNQQEYKISSFEQRLMNEIEFRLERTPVDESDDEIQHDEIPTGKCIAPIFDKRLKHFRVTEGSPVTFTCKIVGIPVPKVYWFKDGKQISKRNEHCKMRREGDGTCSLHIESTTSDDDGNYTIMAANPQGRISCSGHLMVQSLPIRSRLTSAGQSHRGRSRVQERDKEPLQERFFRPHFLQAPGDMVAHEGRLCRLDCKVSGLPPPELTWLLNGQPVLPDASHKMLVRETGVHSLLIDPLTQRDAGTYKCIATNKTGQNSFSLELSVVAKEVKKAPVILEKLQNCGVPEGHPVRLECRVIGMPPPVFYWKKDNETIPCTRERISMHQDTTGYACLLIQPAKKSDAGWYTLSAKNEAGIVSCTARLDIYAQWHHQIPPPMSVRPSGSRYGSLTSKGLDIFSAFSSMESTMVYSCSSRSVVESDEL

SEQ ID NO: 34 - DNA, 309 bp, Homo sapiens
  CDS (1)...(309)
atgcttaccgtccaagtgaagacttcctctgccatagaacttccagattccttggcattcctgtggatcatcccaatgtggtactgtgaaggcaaggagcttgaaaattccccagatattcacatcgtccaggcaggaaatctgcactcactgaccattgcggaagcctttgaagaggacacaggacgctattcctgctttgcttctaacatctatgggacagattcgacttctgctgagatttatatagaaggggtttcttcttctgactcagaaggcgaccctaacaaggaagagatgaatcggtaa

SEQ ID NO: 35 - protein, 102 aa, Homo sapiens
MLTVQVKTSSAIELPDSLAFLWIIPMWYCEGKELENSPDIHIVQAGNLHSLTIAEAFEEDTGRYSCFASNIYGTDSTSAEIYIEGVSSSDSEGDPNKEEMNR

SEQ ID NO: 36 - DNA, 435 bp, Homo sapiens
  CDS (1)...(435)
atgcttaccgtccaagtgaagacttcctctgccatagaacttccagattccttggcattcctgtggatcatcccaatgtggtactgtgaaggcaaggagcttgaaaattccccagatattcacatcgtccaggcaggaaatctgcactcactgaccattgcggaagcctttgaagaggacacaggacgctattcctgctttgcttctaacatctatgggacagattcgacttctgctgagatttatatagaaggggtttcttcttctgactcagaaggcgaccctaacaaggaagagatgaatcgtgtcagagccccaccaattacttgcagggattggatggaaaacctatcattgcagctcctgtgtttacaaagatgctacaaaatttgtcagcttctgagggtcagctggttgtctttgaatgcagagtaa

SEQ ID NO: 37 - protein, 144 aa, Homo sapiens
MLTVQVKTSSAIELPDSLAFLWIIPMWYCEGKELENSPDIHIVQAGNLHSLTIAEAFEEDTGRYSCFASNIYGTDSTSAEIYIEGVSSSDSEGDPNKEEMNRVRAPPITCRDWMENLSLQLLCLQRCYKICQLLRVSWLSLNAE

SEQ ID NO: 38 - DNA, 381 bp, Homo sapiens
  CDS (1)...(381)
atgcttaccgtccaagtgaagacttcctctgccatagaacttccagattccttggcattcctgtggatcatcccaatgtggtactgtgaaggcaaggagcttgaaaattccccagatattcacatcgtccaggcaggaaatctgcactcactgaccattgcggaagcctttgaagaggacacaggacgctattcctgctttgcttctaacatctatgggacagattcgacttctgctgagatttatatagaaggggtttcttcttctgactcagaaggcgaccctaacaaggaagagatgaatcgtgtcagagccccaccaattacttgcagggattggatggaaaacctatcattgcagctcctgtgtttacaaaggtaa

SEQ ID NO: 39 - protein, 126 aa, Homo sapiens
MLTVQVKTSSAIELPDSLAFLWIIPMWYCEGKELENSPDIHIVQAGNLHSLTIAEAFEEDTGRYSCFASNIYGTDSTSAEIYIEGVSSSDSEGDPNKEEMNRVRAPPITCRDWMENLSLQLLCLQR

SEQ ID NO: 40 - DNA, 555 bp, Homo sapiens
  CDS (1)...(555)
atgcttaccgtccaagtgaagacttcctctgccatagaacttccagattccttggcattcctgtggatcatcccaatgtggtactgtgaaggcaaggagcttgaaaattccccagatattcacatcgtccaggcaggaaatctgcactcactgaccattgcggaagcctttgaagaggacacaggacgctattcctgctttgcttctaacatctatgggacagattcgacttctgctgagatttatatagaaggggtttcttcttctgactcagaaggcgaccctaacaaggaagagatgaatcgaatccagaagccaaatgaggtgtcatctcctcccactacctctgcagtcattcctccagcagtaccccaagcccagcatttggtggcccaacctcgtgtggcaaccatccagcagtgtcagagccccaccaattacttgcagggattggatggaaaacctatcattgcagctcctgtgtttacaaaggtaataaaaatattacttctttctgtcatggctttaaagataccacagcacccaaagttatag

SEQ ID NO: 41 - protein, 184 aa, Homo sapiens
MLTVQVKTSSAIELPDSLAFLWIIPMWYCEGKELENSPDIHIVQAGNLHSLTIAEAFEEDTGRYSCFASNIYGTDSTSAEIYIEGVSSSDSEGDPNKEEMNRIQKPNEVSSPPTTSAVIPPAVPQAQHLVAQPRVATIQQCQSPTNYLQGLDGKPIIAAPVFTKVIKILLLSVMALKIPQHPKL

SEQ ID NO: 42 - DNA, 886 bp, Homo sapiens
  CDS (1)...(886)
atgcttaccgtccaagtgaagacttcctctgccatagaacttccagattccttggcattcctgtggatcatcccaatgtggtactgtgaaggcaaggagcttgaaaattccccagatattcacatcgtccaggcaggaaatctgcactcactgaccattgcggaagcctttgaagaggacacaggacgctattcctgctttgcttctaacatctatgggacagattcgacttctgctgagatttatatagaaggggtttcttcttctgactcagaaggcgaccctaacaaggaagagatgaatcgaatccagaagccaaatgaggtgtcatctcctcccactacctctgcagtcattcctccagcagtaccccaagcccagcatttggtggcccaacctcgtgtggcaaccatccagcagtgtcagagccccaccaattacttgcagggattggatggaaaacctatcattgcagctcctgtgtttacaaagatgctacaaaatttgtcagcttctgagggtcagctggttgtctttgaatgcagagtaaaaggagctccatctcctaaggttgagtggtatagagaagggactttaatagaagattctccagattttaggattttacagaaaaaacctcgatccatggcagagccagaggagatttgcaccttggtcattgctgaggtgtttgcagaagattctgggtgcttcacatgtactgcaagcaacaaatacggcacagtgtcaagcattgcacagctgcacgtgagaggaaatgaggacctcagcaacaacgggtctcttcactcagccaactcyaccaccaacctggcagctatttaccctatagcaccccctctaccccctctagagccaaaaaaaa

SEQ ID NO: 43 - protein, 295 aa, Homo sapiens
  VARIANT (1)...(295): Xaa = Any Amino Acid
MLTVQVKTSSAIELPDSLAFLWIIPMWYCEGKELENSPDIHIVQAGNLHSLTIAEAFEEDTGRYSCFASNIYGTDSTSAEIYIEGVSSSDSEGDPNKEEMNRIQKPNEVSSPPTTSAVIPPAVPQAQHLVAQPRVATIQQCQSPTNYLQGLDGKPIIAAPVFTKMLQNLSASEGQLVVFECRVKGAPSPKVEWYREGTLIEDSPDFRILQKKPRSMAEPEEICTLVIAEVFAEDSGCFTCTASNKYGTVSSIAQLHVRGNEDLSNNGSLHSANXTTNLAAIYPIAPPLPPLEPKK

SEQ ID NO: 44 - DNA, 1440 bp, Homo sapiens
  CDS (1)...(1440)
atgcttaccgtccaagtgaagacttcctctgccatagaacttccagattccttggcattcctgtggatcatcccaatgtggtactgtgaaggcaaggagcttgaaaattccccagatattcacatcgtccaggcaggaaatctgcactcactgaccattgcggaagcctttgaagaggacacaggacgctattcctgctttgcttctaacatctatgggacagattcgacttctgctgagatttatatagaaggggtttcttcttctgactcagaaggcgaccctaacaaggaagagatgaatcgaatccagaagccaaatgaggtgtcatctcctcccactacctctgcagtcattcctccagcagtaccccaagcccagcatttggtggcccaacctcgtgtggcaaccatccagcagtgtcagagccccaccaattacttgcagggattggatggaaaacctatcattgcagctcctgtgtttacaaagatgctacaaaatttgtcagcttctgagggtcagctggttgtctttgaatgcagagtaaaaggagctccatctcctaaggttgagtggtatagagaagggactttaatagaagattctccagattttaggattttacagaaaaaacctcgatccatggcagagccagaggagatttgcaccttggtcattgctgaggtgtttgcagaagattctgggtgcttcacatgtactgcaagcaacaaatacggcacagtgtcaagcattgcacagctgcacgtgagaggaaatgaggacctcagcaacaacgggtctcttcactcagccaactcyaccaccaacctggcagctattgagccacagccctccccaccccactcagagcctccatctgtggaacaaccccccaaacccaaactcgagggggttctggtgaaccacaatgagccccggtccagctccaggattgggcttcgtgtgcacttcaacctgcctgaagatgacaaaggaagtgaagcatcctccgaggctggtgtggtgaccaccagacagaccaggcccgattctttscaggagaggttcaacggacaggcaacaaaaaccccagagccttctttccccgtgaaagagccccctccagttctggccaaacccaaacttgattccactcagttacaacagcttcataaccaagtcttactggaacaacaccaattgcaaaacccacctccttcatctcctaaggagtttcctttcarcatgactgttttgaactccaatgctcccccagcggtgacaacatccartaagcaggtgaaggctccttcatcacagacgttcagcttggcccggccgaagtatttcttcccctccacgaacaccaccgcagcaactgtggccccttccagctctccggtgttcactttgagcagcattccccctcaaacctaa

SEQ ID NO: 45 - protein, 479 aa, Homo sapiens
  VARIANT (1)...(479): Xaa = Any Amino Acid
MLTVQVKTSSAIELPDSLAFLWIIPMWYCEGKELENSPDIHIVQAGNLHSLTIAEAFEEDTGRYSCFASNIYGTDSTSAEIYIEGVSSSDSEGDPNKEEMNRIQKPNEVSSPPTTSAVIPPAVPQAQHLVAQPRVATIQQCQSPTNYLQGLDGKPIIAAPVFTKMLQNLSASEGQLVVFECRVKGAPSPKVEWYREGTLIEDSPDFRILQKKPRSMAEPEEICTLVIAEVFAEDSGCFTCTASNKYGTVSSIAQLHVRGNEDLSNNGSLHSANXTTNLAAIEPQPSPPHSEPPSVEQPPKPKLEGVLVNHNEPRSSSRIGLRVHFNLPEDDKGSEASSEAGVVTTRQTRPDSXQERFNGQATKTPEPSFPVKEPPPVLAKPKLDSTQLQQLHNQVLLEQHQLQNPPPSSPKEFPFXMTVLNSNAPPAVTTSXKQVKAPSSQTFSLARPKYFFPSTNTTAATVAPSSSPVFTLSSIPPQT

SEQ ID NO: 46 - DNA, 3150 bp, Homo sapiens
  CDS (1)...(3150)
atgacggtggttaatccacaagacctgcagccgtgggtctctaacttcacctaccctggagcccgggatttctcccagctggctttggacccctccgggraccagctcatcgtgggagccaggaactacctcttcagactcagccttgccaatgtctctcttcttcaggccacagagtgggcctccagtgaggacacgcgccgctcctgccaaagcaaagggaagactgaggaggagtgtcagaactacgtgcgagtcctgatcgtcgccggccggaaggtgttcatgtgtggaaccaatgccttttcccccatgtgcaccagcagacaggtggggaacctcagccggactattgagaagatcaatggtgtggcccgctgcccctatgacccacgccacaactccacagctgtcatctcctcccagggggagctctatgcagccacggtcatcgacttctcaggtcgggaccctgccatctaccgcagcctgggcagtgggccaccgcttcgcactgcccaatataactccaagtggcttaatgagccaaacttcgtggcagcctatgatattgggctgtttgcatacttcttcctgcgggagaacgcagtggagcacgactgtggacgcaccgtgtactctcgcgtggcccgcgtgtgcaagaatgacgtggggggccgattcctgctggaggacacatggaccacattcatgaaggcccggctcaactgctcccgcccgggcgaggtccccttctactataacgagctgcagagtgccttccacttgccrgagcaggacctcatctatggagttttcacaaccaacgtaaacagcatygcggcttctgctgtctgcgccttcaacctcagtgctatctcccaggctttcaatggcccatttcgctaccaggagaaccccagggctgcctggctccccatagccaaccccatccccaatttccagtgtggcaccctgcctgagaccggtcccaacgagaacctgacggagcgcagcctgcaggacgcgcagcgcctcttcctgatgagcgaggccgtgcagccggtgacacccgagccctgtgtcacccaggacagcgtgcgcttctcacacctcgtggtggacctggtgcaggctaaagacacgctctaccatgtactctacattggcaccgagtcgggcaccatcctgaaggcgctgtccacggcgagccgcagcctccacggctgctacctggaggagctgcacgtgctgccccccgggcgccgcgagcccctgcgcagcctgcgcatcctgcacagcgcccgcgcgctcttcgtggggctgagagacggcgtcctgcgggtcccactggagaggtgcgccgcctaccgcagccagggggcatgcctgggggcccgggacccgtactgtggctgggacgggaagcagcaacgttgcagcacactcgaggacagctccaacatgagcctctggacccagaacatcaccgcctgtcctgtgcggaatgtgacacgggatgggggcttcggcccatggtcaccatggcaaccatgtgagcacttggatggggacaactcaggctcttgcctgtgtcgagctcgatcctgtgattcccctcgaccccgctgtgggggccttgactgcctggggccagccatccacatcgccaactgctccaggaatggggcgtggaccccgtggtcatcgtgggcgctgtgcagcacgtcctgtggcatcggcttccaggtccgccagcgaagttgcagcaaccctgctccccgccacgggggccgcatctgcgtgggcaagagccgggaggaacggttctgtaatgagaacacgccttgcccggtgcccatcttctgggcttcctggggctcctggagcaagtgcagcagcaactgtggagggggcatgcagtcgcggcgtcgggcctgcgagaacggcaactcctgcctgggctgcggcgtggagttcaagacgtgcaaccccgagggctgccccgaagtgcggcgcaacaccccctggacgccgtggctgcccgtgaacgtgacgcagggcggggcacggcaggagcagcggttccgcttcacctgccgcgcgccccttgcagacccgcacggcctgcagttcggcaggagaaggaccgagacgaggacctgtcccgcggacggctccggctcctgcgacaccgacgccctggtggaggacctcctgcgcagcgggagcacctccccgcacacggtgagcgggggctgggccgcctggggcccgtggtcgtcctgctcccgggactgcgagctgggcttccgcgtccgcaagagaacgtgcactaacccggagccccgcaacgggggcctgccctgcgtgggcgatgctgccgagtaccaggactgcaacccccaggcttgcccagttcggggtgcttggtcctgctggacctcatggtctccatgctcagcttcctgtggtgggggtcactatcaacgcacccgttcctgcaccagccccgcaccctccccaggtgaggacatctgtctcgggctgcacacggaggaggcactatgtgccacacaggcctgcccagaaggctggtcgccctggtctgagtggagtaagtgcactgacgacggagcccagagccgaagccggcactgtgaggagctcctcccagggtccagcgcctgtgctggaaacagcagccagagccgcccctgcccctacagcgagattcccgtcatcctgccagcctccagcatggaggaggccaccggctgtgcagggttcaatctcatccacttggtggccacgggcatctcctgcttcttgggctctgggctcctgaccctagcagtgtacctgtcttgccagcactgccagcgtcagtcccaggagtccacactggtccatcctgccacccccaaccatttgcactacaagggcggaggcaccccgaagaatgaaaagtacacacccatggaattcaagaccctgaacaagaataacttgatccctgatgacagagccaacttctacccattgcagcagaccaatgtgtacacgactacttactacccaagccccctgaacaaacacagcttccggcccgaggcctcacctggacaacggtgcttccccaacagctga

SEQ ID NO: 47 - protein, 1049 aa, Homo sapiens
  VARIANT (1)...(1049): Xaa = Any Amino Acid
MTVVNPQDLQPWVSNFTYPGARDFSQLALDPSGXQLIVGARNYLFRLSLANVSLLQATEWASSEDTRRSCQSKGKTEEECQNYVRVLIVAGRKVFMCGTNAFSPMCTSRQVGNLSRTIEKINGVARCPYDPRHNSTAVISSQGELYAATVIDFSGRDPAIYRSLGSGPPLRTAQYNSKWLNEPNFVAAYDIGLFAYFFLRENAVEHDCGRTVYSRVARVCKNDVGGRFLLEDTWTTFMKARLNCSRPGEVPFYYNELQSAFHLXEQDLIYGVFTTNVNSXAASAVCAFNLSAISQAFNGPFRYQENPRAAWLPIANPIPNFQCGTLPETGPNENLTERSLQDAQRLFLMSEAVQPVTPEPCVTQDSVRFSHLVVDLVQAKDTLYHVLYIGTESGTILKALSTASRSLHGCYLEELHVLPPGRREPLRSLRILHSARALFVGLRDGVLRVPLERCAAYRSQGACLGARDPYCGWDGKQQRCSTLEDSSNMSLWTQNITACPVRNVTRDGGFGPWSPWQPCEHLDGDNSGSCLCRARSCDSPRPRCGGLDCLGPAIHIANCSRNGAWTPWSSWALCSTSCGIGFQVRQRSCSNPAPRHGGRICVGKSREERFCNENTPCPVPIFWASWGSWSKCSSNCGGGMQSRRRACENGNSCLGCGVEFKTCNPEGCPEVRRNTPWTPWLPVNVTQGGARQEQRFRFTCRAPLADPHGLQFGRRRTETRTCPADGSGSCDTDALVEDLLRSGSTSPHTVSGGWAAWGPWSSCSRDCELGFRVRKRTCTNPEPRNGGLPCVGDAAEYQDCNPQACPVRGAWSCWTSWSPCSASCGGGHYQRTRSCTSPAPSPGEDICLGLHTEEALCATQACPEGWSPWSEWSKCTDDGAQSRSRHCEELLPGSSACAGNSSQSRPCPYSEIPVILPASSMEEATGCAGFNLIHLVATGISCFLGSGLLTLAVYLSCQHCQRQSQESTLVHPATPNHLHYKGGGTPKNEKYTPMEFKTLNKNNLIPDDRANFYPLQQTNVYTTTYYPSPLNKHSFRPEASPGQRCFPNS

SEQ ID NO: 48 - DNA, 3282 bp, Homo sapiens
  CDS (1)...(3282)
atggtgcttgcaggccccctggctgtctcgctgttgctgcccagcctcacactgctggtgtcccacctctccagctcccaggatgtctccagtgagcccagcagtgagcagcagctgtgcgcccttagcaagcaccccaccgtggcctttgaagacctgcagccgtgggtctctaacttcacctaccctggagcccgggatttctcccagctggctttggacccctccgggraccagctcatcgtgggagccaggaactacctcttcagactcagccttgccaatgtctctcttcttcaggccacagagtgggcctccagtgaggacacgcgccgctcctgccaaagcaaagggaagactgaggaggagtgtcagaactacgtgcgagtcctgatcgtcgccggccggaaggtgttcatgtgtggaaccaatgccttttcccccatgtgcaccagcagacaggtggggaacctcagccggactattgagaagatcaatggtgtggcccgctgcccctatgacccacgccacaactccacagctgtcatctcctcccagggggagctctatgcagccacggtcatcgacttctcaggtcgggaccctgccatctaccgcagcctgggcagtgggccaccgcttcgcactgcccaatataactccaagtggcttaatgagccaaacttcgtggcagcctatgatattgggctgtttgcatacttcttcctgcgggagaacgcagtggagcacgactgtggacgcaccgtgtactctcgcgtggcccgcgtgtgcaagaatgacgtggggggccgattcctgctggaggacacatggaccacattcatgaaggcccggctcaactgctcccgcccgggcgaggtccccttctactataacgagctgcagagtgccttccacttgccrgagcaggacctcatctatggagttttcacaaccaacgtaaacagcatygcggcttctgctgtctgcgccttcaacctcagtgctatctcccaggctttcaatggcccatttcgctaccaggagaaccccagggctgcctggctccccatagccaaccccatccccaatttccagtgtggcaccctgcctgagaccggtcccaacgagaacctgacggagcgcagcctgcaggacgcgcagcgcctcttcctgatgagcgaggccgtgcagccggtgacacccgagccctgtgtcacccaggacagcgtgcgcttctcacacctcgtggtggacctggtgcaggctaaagacacgctctaccatgtactctacattggcaccgagtcgggcaccatcctgaaggcgctgtccacggcgagccgcagcctccacggctgctacctggaggagctgcacgtgctgccccccgggcgccgcgagcccctgcgcagcctgcgcatcctgcacagcgcccgcgcgctcttcgtggggctgagagacggcgtcctgcgggtcccactggagaggtgcgccgcctaccgcagccagggggcatgcctgggggcccgggacccgtactgtggctgggacgggaagcagcaacgttgcagcacactcgaggacagctccaacatgagcctctggacccagaacatcaccgcctgtcctgtgcggaatgtgacacgggatgggggcttcggcccatggtcaccatggcaaccatgtgagcacttggatggggacaactcaggctcttgcctgtgtcgagctcgatcctgtgattcccctcgaccccgctgtgggggccttgactgcctggggccagccatccacatcgccaactgctccaggaatggggcgtggaccccgtggtcatcgtgggcgctgtgcagcacgtcctgtggcatcggcttccaggtccgccagcgaagttgcagcaaccctgctccccgccacgggggccgcatctgcgtgggcaagagccgggaggaacggttctgtaatgagaacacgccttgcccggtgcccatcttctgggcttcctggggctcctggagcaagtgcagcagcaactgtggagggggcatgcagtcgcggcgtcgggcctgcgagaacggcaactcctgcctgggctgcggcgtggagttcaagacgtgcaaccccgagggctgccccgaagtgcggcgcaacaccccctggacgccgtggctgcccgtgaacgtgacgcagggcggggcacggcaggagcagcggttccgcttcacctgccgcgcgccccttgcagacccgcacggcctgcagttcggcaggagaaggaccgagacgaggacctgtcccgcggacggctccggctcctgcgacaccgacgccctggtggaggacctcctgcgcagcgggagcacctccccgcacacggtgagcgggggctgggccgcctggggcccgtggtcgtcctgctcccgggactgcgagctgggcttccgcgtccgcaagagaacgtgcactaacccggagccccgcaacgggggcctgccctgcgtgggcgatgctgccgagtaccaggactgcaacccccaggcttgcccagttcggggtgcttggtcctgctggacctcatggtctccatgctcagcttcctgtggtgggggtcactatcaacgcacccgttcctgcaccagccccgcaccctccccaggtgaggacatctgtctcgggctgcacacggaggaggcactatgtgccacacaggcctgcccagaaggctggtcgccctggtctgagtggagtaagtgcactgacgacggagcccagagccgaagccggcactgtgaggagctcctcccagggtccagcgcctgtgctggaaacagcagccagagccgcccctgcccctacagcgagattcccgtcatcctgccagcctccagcatggaggaggccaccggctgtgcagggttcaatctcatccacttggtggccacgggcatctcctgcttcttgggctctgggctcctgaccctagcagtgtacctgtcttgccagcactgccagcgtcagtcccaggagtccacactggtccatcctgccacccccaaccatttgcactacaagggcggaggcaccccgaagaatgaaaagtacacacccatggaattcaagaccctgaacaagaataacttgatccctgatgacagagccaacttctacccattgcagcagaccaatgtgtacacgactacttactacccaagccccctgaacaaacacagcttccggcccgaggcctcacctggacaacggtgcttccccaacagctga

SEQ ID NO: 49 - protein, 1093 aa, Homo sapiens
  VARIANT (1)...(1093): Xaa = Any Amino Acid
MVLAGPLAVSLLLPSLTLLVSHLSSSQDVSSEPSSEQQLCALSKHPTVAFEDLQPWVSNFTYPGARDFSQLALDPSGXQLIVGARNYLFRLSLANVSLLQATEWASSEDTRRSCQSKGKTEEECQNYVRVLIVAGRKVFMCGTNAFSPMCTSRQVGNLSRTIEKINGVARCPYDPRHNSTAVISSQGELYAATVIDFSGRDPAIYRSLGSGPPLRTAQYNSKWLNEPNFVAAYDIGLFAYFFLRENAVEHDCGRTVYSRVARVCKNDVGGRFLLEDTWTTFMKARLNCSRPGEVPFYYNELQSAFHLXEQDLIYGVFTTNVNSXAASAVCAFNLSAISQAFNGPFRYQENPRAAWLPIANPIPNFQCGTLPETGPNENLTERSLQDAQRLFLMSEAVQPVTPEPCVTQDSVRFSHLVVDLVQAKDTLYHVLYIGTESGTILKALSTASRSLHGCYLEELHVLPPGRREPLRSLRILHSARALFVGLRDGVLRVPLERCAAYRSQGACLGARDPYCGWDGKQQRCSTLEDSSNMSLWTQNITACPVRNVTRDGGFGPWSPWQPCEHLDGDNSGSCLCRARSCDSPRPRCGGLDCLGPAIHIANCSRNGAWTPWSSWALCSTSCGIGFQVRQRSCSNPAPRHGGRICVGKSREERFCNENTPCPVPIFWASWGSWSKCSSNCGGGMQSRRRACENGNSCLGCGVEFKTCNPEGCPEVRRNTPWTPWLPVNVTQGGARQEQRFRFTCRAPLADPHGLQFGRRRTETRTCPADGSGSCDTDALVEDLLRSGSTSPHTVSGGWAAWGPWSSCSRDCELGFRVRKRTCTNPEPRNGGLPCVGDAAEYQDCNPQACPVRGAWSCWTSWSPCSASCGGGHYQRTRSCTSPAPSPGEDICLGLHTEEALCATQACPEGWSPWSEWSKCTDDGAQSRSRHCEELLPGSSACAGNSSQSRPCPYSEIPVILPASSMEEATGCAGFNLIHLVATGISCFLGSGLLTLAVYLSCQHCQRQSQESTLVHPATPNHLHYKGGGTPKNEKYTPMEFKTLNKNNLIPDDRANFYPLQQTNVYTTTYYPSPLNKHSFRPEASPGQRCFPNS

SEQ ID NO: 50 - DNA, 3105 bp, Homo sapiens
  CDS (1)...(3105)
atgacggtggttaatccacaagacctgcagccgtgggtctctaacttcacctaccctggagcccgggatttctcccagctggctttggacccctccgggraccagctcatcgtgggagccaggaactacctcttcagactcagccttgccaatgtctctcttcttcaggccacagagtgggcctccagtgaggacacgcgccgctcctgccaaagcaaagggaagactgaggaggagtgtcagaactacgtgcgagtcctgatcgtcgccggccggaaggtgttcatgtgtggaaccaatgccttttcccccatgtgcaccagcagacaggtggggaacctcagccggactattgagaagatcaatggtgtggcccgctgcccctatgacccacgccacaactccacagctgtcatctcctcccagggggagctctatgcagccacggtcatcgacttctcaggtcgggaccctgccatctaccgcagcctgggcagtgggccaccgcttcgcactgcccaatataactccaagtggcttaatgagccaaacttcgtggcagcctatgatattgggctgtttgcatacttcttcctgcgggagaacgcagtggagcacgactgtggacgcaccgtgtactctcgcgtggcccgcgtgtgcaagaatgacgtggggggccgattcctgctggaggacacatggaccacattcatgaaggcccggctcaactgctcccgcccgggcgaggtccccttctactataacgagctgcagagtgccttccacttgccrgagcaggacctcatctatggagttttcacaaccaacgtaaacagcatygcggcttctgctgtctgcgccttcaacctcagtgctatctcccaggctttcaatggcccatttcgctaccaggagaaccccagggctgcctggctccccatagccaaccccatccccaatttccagtgtggcaccctgcctgagaccggtcccaacgagaacctgacggagcgcagcctgcaggacgcgcagcgcctcttcctgatgagcgaggccgtgcagccggtgacacccgagccctgtgtcacccaggacagcgtgcgcttctcacacctcgtggtggacctggtgcaggctaaagacacgctctaccatgtactctacattggcaccgagtcgggcaccatcctgaaggcgctgtccacggcgagccgcagcctccacggctgctacctggaggagctgcacgtgctgccccccgggcgccgcgagcccctgcgcagcctgcgcatcctgcacagcgcccgcgcgctcttcgtggggctgagagacggcgtcctgcgggtcccactggagaggtgcgccgcctaccgcagccagggggcatgcctgggggcccgggacccgtactgtggctgggacgggaagcagcaacgttgcagcacactcgaggacagctccaacatgagcctctggacccagaacatcaccgcctgtcctgtgcggaatgtgacacgggatgggggcttcggcccatggtcaccatggcaaccatgtgagcacttggatggggacaactcaggctcttgcctgtgtcgagctcgatcctgtgattcccctcgaccccgctgtgggggccttgactgcctggggccagccatccacatcgccaactgctccaggaatggggcgtggaccccgtggtcatcgtgggcgctgtgcagcacgtcctgtggcatcggcttccaggtccgccagcgaagttgcagcaaccctgctccccgccacgggggccgcatctgcgtgggcaagagccgggaggaacggttctgtaatgagaacacgccttgcccggtgcccatcttctgggcttcctggggctcctggagcaagtgcagcagcaactgtggagggggcatgcagtcgcggcgtcgggcctgcgagaacggcaactcctgcctgggctgcggcgtggagttcaagacgtgcaaccccgagggctgccccgaagtgcggcgcaacaccccctggacgccgtggctgcccgtgaacgtgacgcagggcggggcacggcaggagcagcggttccgcttcacctgccgcgcgccccttgcagacccgcacggcctgcagttcggcaggagaaggaccgagacgaggacctgtcccgcggacggctccggctcctgcgacaccgacgccctggtggaggacctcctgcgcagcgggagcacctccccgcacacggtgagcgggggctgggccgcctggggcccgtggtcgtcctgctcccgggactgcgagctgggcttccgcgtccgcaagagaacgtgcactaacccggagccccgcaacgggggcctgccctgcgtgggcgatgctgccgagtaccaggactgcaacccccaggcttgcccagttcggggtgcttggtcctgctggacctcatggtctccatgctcagcttcctgtggtgggggtcactatcaacgcacccgttcctgcaccagccccgcaccctccccaggtgaggacatctgtctcgggctgcacacggaggaggcactatgtgccacacaggcctgcccagaaggctggtcgccctggtctgagtggagtaagtgcactgacgacggagcccagagccgaagccggcactgtgaggagctcctcccagggtccagcgcctgtgctggaaacagcagccagagccgcccctgcccctacagcgagattcccgggttcaatctcatccacttggtggccacgggcatctcctgcttcttgggctctgggctcctgaccctagcagtgtacctgtcttgccagcactgccagcgtcagtcccaggagtccacactggtccatcctgccacccccaaccatttgcactacaagggcggaggcaccccgaagaatgaaaagtacacacccatggaattcaagaccctgaacaagaataacttgatccctgatgacagagccaacttctacccattgcagcagaccaatgtgtacacgactacttactacccaagccccctgaacaaacacagcttccggcccgaggcctcacctggacaacggtgcttccccaacagctga

SEQ ID NO: 51 - protein, 1034 aa, Homo sapiens
  VARIANT (1)...(1034): Xaa = Any Amino Acid
MTVVNPQDLQPWVSNFTYPGARDFSQLALDPSGXQLIVGARNYLFRLSLANVSLLQATEWASSEDTRRSCQSKGKTEEECQNYVRVLIVAGRKVFMCGTNAFSPMCTSRQVGNLSRTIEKINGVARCPYDPRHNSTAVISSQGELYAATVIDFSGRDPAIYRSLGSGPPLRTAQYNSKWLNEPNFVAAYDIGLFAYFFLRENAVEHDCGRTVYSRVARVCKNDVGGRFLLEDTWTTFMKARLNCSRPGEVPFYYNELQSAFHLXEQDLIYGVFTTNVNSXAASAVCAFNLSAISQAFNGPFRYQENPRAAWLPIANPIPNFQCGTLPETGPNENLTERSLQDAQRLFLMSEAVQPVTPEPCVTQDSVRFSHLVVDLVQAKDTLYHVLYIGTESGTILKALSTASRSLHGCYLEELHVLPPGRREPLRSLRILHSARALFVGLRDGVLRVPLERCAAYRSQGACLGARDPYCGWDGKQQRCSTLEDSSNMSLWTQNITACPVRNVTRDGGFGPWSPWQPCEHLDGDNSGSCLCRARSCDSPRPRCGGLDCLGPAIHIANCSRNGAWTPWSSWALCSTSCGIGFQVRQRSCSNPAPRHGGRICVGKSREERFCNENTPCPVPIFWASWGSWSKCSSNCGGGMQSRRRACENGNSCLGCGVEFKTCNPEGCPEVRRNTPWTPWLPVNVTQGGARQEQRFRFTCRAPLADPHGLQFGRRRTETRTCPADGSGSCDTDALVEDLLRSGSTSPHTVSGGWAAWGPWSSCSRDCELGFRVRKRTCTNPEPRNGGLPCVGDAAEYQDCNPQACPVRGAWSCWTSWSPCSASCGGGHYQRTRSCTSPAPSPGEDICLGLHTEEALCATQACPEGWSPWSEWSKCTDDGAQSRSRHCEELLPGSSACAGNSSQSRPCPYSEIPGFNLIHLVATGISCFLGSGLLTLAVYLSCQHCQRQSQESTLVHPATPNHLHYKGGGTPKNEKYTPMEFKTLNKNNLIPDDRANFYPLQQTNVYTTTYYPSPLNKHSFRPEASPGQRCFPNS

SEQ ID NO: 52 - DNA, 3237 bp, Homo sapiens
  CDS (1)...(3237)
atggtgcttgcaggccccctggctgtctcgctgttgctgcccagcctcacactgctggtgtcccacctctccagctcccaggatgtctccagtgagcccagcagtgagcagcagctgtgcgcccttagcaagcaccccaccgtggcctttgaagacctgcagccgtgggtctctaacttcacctaccctggagcccgggatttctcccagctggctttggacccctccgggraccagctcatcgtgggagccaggaactacctcttcagactcagccttgccaatgtctctcttcttcaggccacagagtgggcctccagtgaggacacgcgccgctcctgccaaagcaaagggaagactgaggaggagtgtcagaactacgtgcgagtcctgatcgtcgccggccggaaggtgttcatgtgtggaaccaatgccttttcccccatgtgcaccagcagacaggtggggaacctcagccggactattgagaagatcaatggtgtggcccgctgcccctatgacccacgccacaactccacagctgtcatctcctcccagggggagctctatgcagccacggtcatcgacttctcaggtcgggaccctgccatctaccgcagcctgggcagtgggccaccgcttcgcactgcccaatataactccaagtggcttaatgagccaaacttcgtggcagcctatgatattgggctgtttgcatacttcttcctgcgggagaacgcagtggagcacgactgtggacgcaccgtgtactctcgcgtggcccgcgtgtgcaagaatgacgtggggggccgattcctgctggaggacacatggaccacattcatgaaggcccggctcaactgctcccgcccgggcgaggtccccttctactataacgagctgcagagtgccttccacttgccrgagcaggacctcatctatggagttttcacaaccaacgtaaacagcatygcggcttctgctgtctgcgccttcaacctcagtgctatctcccaggctttcaatggcccatttcgctaccaggagaaccccagggctgcctggctccccatagccaaccccatccccaatttccagtgtggcaccctgcctgagaccggtcccaacgagaacctgacggagcgcagcctgcaggacgcgcagcgcctcttcctgatgagcgaggccgtgcagccggtgacacccgagccctgtgtcacccaggacagcgtgcgcttctcacacctcgtggtggacctggtgcaggctaaagacacgctctaccatgtactctacattggcaccgagtcgggcaccatcctgaaggcgctgtccacggcgagccgcagcctccacggctgctacctggaggagctgcacgtgctgccccccgggcgccgcgagcccctgcgcagcctgcgcatcctgcacagcgcccgcgcgctcttcgtggggctgagagacggcgtcctgcgggtcccactggagaggtgcgccgcctaccgcagccagggggcatgcctgggggcccgggacccgtactgtggctgggacgggaagcagcaacgttgcagcacactcgaggacagctccaacatgagcctctggacccagaacatcaccgcctgtcctgtgcggaatgtgacacgggatgggggcttcggcccatggtcaccatggcaaccatgtgagcacttggatggggacaactcaggctcttgcctgtgtcgagctcgatcctgtgattcccctcgaccccgctgtgggggccttgactgcctggggccagccatccacatcgccaactgctccaggaatggggcgtggaccccgtggtcatcgtgggcgctgtgcagcacgtcctgtggcatcggcttccaggtccgccagcgaagttgcagcaaccctgctccccgccacgggggccgcatctgcgtgggcaagagccgggaggaacggttctgtaatgagaacacgccttgcccggtgcccatcttctgggcttcctggggctcctggagcaagtgcagcagcaactgtggagggggcatgcagtcgcggcgtcgggcctgcgagaacggcaactcctgcctgggctgcggcgtggagttcaagacgtgcaaccccgagggctgccccgaagtgcggcgcaacaccccctggacgccgtggctgcccgtgaacgtgacgcagggcggggcacggcaggagcagcggttccgcttcacctgccgcgcgccccttgcagacccgcacggcctgcagttcggcaggagaaggaccgagacgaggacctgtcccgcggacggctccggctcctgcgacaccgacgccctggtggaggacctcctgcgcagcgggagcacctccccgcacacggtgagcgggggctgggccgcctggggcccgtggtcgtcctgctcccgggactgcgagctgggcttccgcgtccgcaagagaacgtgcactaacccggagccccgcaacgggggcctgccctgcgtgggcgatgctgccgagtaccaggactgcaacccccaggcttgcccagttcggggtgcttggtcctgctggacctcatggtctccatgctcagcttcctgtggtgggggtcactatcaacgcacccgttcctgcaccagccccgcaccctccccaggtgaggacatctgtctcgggctgcacacggaggaggcactatgtgccacacaggcctgcccagaaggctggtcgccctggtctgagtggagtaagtgcactgacgacggagcccagagccgaagccggcactgtgaggagctcctcccagggtccagcgcctgtgctggaaacagcagccagagccgcccctgcccctacagcgagattcccgggttcaatctcatccacttggtggccacgggcatctcctgcttcttgggctctgggctcctgaccctagcagtgtacctgtcttgccagcactgccagcgtcagtcccaggagtccacactggtccatcctgccacccccaaccatttgcactacaagggcggaggcaccccgaagaatgaaaagtacacacccatggaattcaagaccctgaacaagaataacttgatccctgatgacagagccaacttctacccattgcagcagaccaatgtgtacacgactacttactacccaagccccctgaacaaacacagcttccggcccgaggcctcacctggacaacggtgcttccccaacagctga

SEQ ID NO: 53 - protein, 1078 aa, Homo sapiens
  VARIANT (1)...(1078): Xaa = Any Amino Acid
MVLAGPLAVSLLLPSLTLLVSHLSSSQDVSSEPSSEQQLCALSKHPTVAFEDLQPWVSNFTYPGARDFSQLALDPSGXQLIVGARNYLFRLSLANVSLLQATEWASSEDTRRSCQSKGKTEEECQNYVRVLIVAGRKVFMCGTNAFSPMCTSRQVGNLSRTIEKINGVARCPYDPRHNSTAVISSQGELYAATVIDFSGRDPAIYRSLGSGPPLRTAQYNSKWLNEPNFVAAYDIGLFAYFFLRENAVEHDCGRTVYSRVARVCKNDVGGRFLLEDTWTTFMKARLNCSRPGEVPFYYNELQSAFHLXEQDLIYGVFTTNVNSXAASAVCAFNLSAISQAFNGPFRYQENPRAAWLPIANPIPNFQCGTLPETGPNENLTERSLQDAQRLFLMSEAVQPVTPEPCVTQDSVRFSHLVVDLVQAKDTLYHVLYIGTESGTILKALSTASRSLHGCYLEELHVLPPGRREPLRSLRILHSARALFVGLRDGVLRVPLERCAAYRSQGACLGARDPYCGWDGKQQRCSTLEDSSNMSLWTQNITACPVRNVTRDGGFGPWSPWQPCEHLDGDNSGSCLCRARSCDSPRPRCGGLDCLGPAIHIANCSRNGAWTPWSSWALCSTSCGIGFQVRQRSCSNPAPRHGGRICVGKSREERFCNENTPCPVPIFWASWGSWSKCSSNCGGGMQSRRRACENGNSCLGCGVEFKTCNPEGCPEVRRNTPWTPWLPVNVTQGGARQEQRFRFTCRAPLADPHGLQFGRRRTETRTCPADGSGSCDTDALVEDLLRSGSTSPHTVSGGWAAWGPWSSCSRDCELGFRVRKRTCTNPEPRNGGLPCVGDAAEYQDCNPQACPVRGAWSCWTSWSPCSASCGGGHYQRTRSCTSPAPSPGEDICLGLHTEEALCATQACPEGWSPWSEWSKCTDDGAQSRSRHCEELLPGSSACAGNSSQSRPCPYSEIPGFNLIHLVATGISCFLGSGLLTLAVYLSCQHCQRQSQESTLVHPATPNHLHYKGGGTPKNEKYTPMEFKTLNKNNLIPDDRANFYPLQQTNVYTTTYYPSPLNKHSFRPEASPGQRCFPNS

SEQ ID NO: 54 - DNA, 3456 bp, Homo sapiens
  CDS (1)...(3456)
atgccctgtggcttcagtccgtctcctgttgcccaccacctcgtccctgggccgcctgataccccagcccaacagctaaggtgtggatggacagtagggggctggcttctctcactggtcaggggtcttctcccctgtctgcctcccggagctaggactgcagaggggcctatcatggtgcttgcaggccccctggctgtctcgctgttgctgcccagcctcacactgctggtgtcccacctctccagctcccaggatgtctccagtgagcccagcagtgagcagcagctgtgcgcccttagcaagcaccccaccgtggcctttgaagacctgcagccgtgggtctctaacttcacctaccctggagcccgggatttctcccagctggctttggacccctccgggraccagctcatcgtgggagccaggaactacctcttcagactcagccttgccaatgtctctcttcttcaggccacagagtgggcctccagtgaggacacgcgccgctcctgccaaagcaaagggaagactgaggaggagtgtcagaactacgtgcgagtcctgatcgtcgccggccggaaggtgttcatgtgtggaaccaatgccttttcccccatgtgcaccagcagacaggtggggaacctcagccggactattgagaagatcaatggtgtggcccgctgcccctatgacccacgccacaactccacagctgtcatctcctcccagggggagctctatgcagccacggtcatcgacttctcaggtcgggaccctgccatctaccgcagcctgggcagtgggccaccgcttcgcactgcccaatataactccaagtggcttaatgagccaaacttcgtggcagcctatgatattgggctgtttgcatacttcttcctgcgggagaacgcagtggagcacgactgtggacgcaccgtgtactctcgcgtggcccgcgtgtgcaagaatgacgtggggggccgattcctgctggaggacacatggaccacattcatgaaggcccggctcaactgctcccgcccgggcgaggtccccttctactataacgagctgcagagtgccttccacttgccrgagcaggacctcatctatggagttttcacaaccaacgtaaacagcatygcggcttctgctgtctgcgccttcaacctcagtgctatctcccaggctttcaatggcccatttcgctaccaggagaaccccagggctgcctggctccccatagccaaccccatccccaatttccagtgtggcaccctgcctgagaccggtcccaacgagaacctgacggagcgcagcctgcaggacgcgcagcgcctcttcctgatgagcgaggccgtgcagccggtgacacccgagccctgtgtcacccaggacagcgtgcgcttctcacacctcgtggtggacctggtgcaggctaaagacacgctctaccatgtactctacattggcaccgagtcgggcaccatcctgaaggcgctgtccacggcgagccgcagcctccacggctgctacctggaggagctgcacgtgctgccccccgggcgccgcgagcccctgcgcagcctgcgcatcctgcacagcgcccgcgcgctcttcgtggggctgagagacggcgtcctgcgggtcccactggagaggtgcgccgcctaccgcagccagggggcatgcctgggggcccgggacccgtactgtggctgggacgggaagcagcaacgttgcagcacactcgaggacagctccaacatgagcctctggacccagaacatcaccgcctgtcctgtgcggaatgtgacacgggatgggggcttcggcccatggtcaccatggcaaccatgtgagcacttggatggggacaactcaggctcttgcctgtgtcgagctcgatcctgtgattcccctcgaccccgctgtgggggccttgactgcctggggccagccatccacatcgccaactgctccaggaatggggcgtggaccccgtggtcatcgtgggcgctgtgcagcacgtcctgtggcatcggcttccaggtccgccagcgaagttgcagcaaccctgctccccgccacgggggccgcatctgcgtgggcaagagccgggaggaacggttctgtaatgagaacacgccttgcccggtgcccatcttctgggcttcctggggctcctggagcaagtgcagcagcaactgtggagggggcatgcagtcgcggcgtcgggcctgcgagaacggcaactcctgcctgggctgcggcgtggagttcaagacgtgcaaccccgagggctgccccgaagtgcggcgcaacaccccctggacgccgtggctgcccgtgaacgtgacgcagggcggggcacggcaggagcagcggttccgcttcacctgccgcgcgccccttgcagacccgcacggcctgcagttcggcaggagaaggaccgagacgaggacctgtcccgcggacggctccggctcctgcgacaccgacgccctggtggaggacctcctgcgcagcgggagcacctccccgcacacggtgagcgggggctgggccgcctggggcccgtggtcgtcctgctcccgggactgcgagctgggcttccgcgtccgcaagagaacgtgcactaacccggagccccgcaacgggggcctgccctgcgtgggcgatgctgccgagtaccaggactgcaacccccaggcttgcccagttcggggtgcttggtcctgctggacctcatggtctccatgctcagcttcctgtggtgggggtcactatcaacgcacccgttcctgcaccagccccgcaccctccccaggtgaggacatctgtctcgggctgcacacggaggaggcactatgtgccacacaggcctgcccagaaggctggtcgccctggtctgagtggagtaagtgcactgacgacggagcccagagccgaagccggcactgtgaggagctcctcccagggtccagcgcctgtgctggaaacagcagccagagccgcccctgcccctacagcgagattcccgtcatcctgccagcctccagcatggaggaggccaccggctgtgcagggttcaatctcatccacttggtggccacgggcatctcctgcttcttgggctctgggctcctgaccctagcagtgtacctgtcttgccagcactgccagcgtcagtcccaggagtccacactggtccatcctgccacccccaaccatttgcactacaagggcggaggcaccccgaagaatgaaaagtacacacccatggaattcaagaccctgaacaagaataacttgatccctgatgacagagccaacttctacccattgcagcagaccaatgtgtacacgactacttactacccaagccccctgaacaaacacagcttccggcccgaggcctcacctggacaacggtgcttccccaacagctga

SEQ ID NO: 55 - protein, 1151 aa, Homo sapiens
  VARIANT (1)...(1151): Xaa = Any Amino Acid
MPCGFSPSPVAHHLVPGPPDTPAQQLRCGWTVGGWLLSLVRGLLPCLPPGARTAEGPIMVLAGPLAVSLLLPSLTLLVSHLSSSQDVSSEPSSEQQLCALSKHPTVAFEDLQPWVSNFTYPGARDFSQLALDPSGXQLIVGARNYLFRLSLANVSLLQATEWASSEDTRRSCQSKGKTEEECQNYVRVLIVAGRKVFMCGTNAFSPMCTSRQVGNLSRTIEKINGVARCPYDPRHNSTAVISSQGELYAATVIDFSGRDPAIYRSLGSGPPLRTAQYNSKWLNEPNFVAAYDIGLFAYFFLRENAVEHDCGRTVYSRVARVCKNDVGGRFLLEDTWTTFMKARLNCSRPGEVPFYYNELQSAFHLXEQDLIYGVFTTNVNSXAASAVCAFNLSAISQAFNGPFRYQENPRAAWLPIANPIPNFQCGTLPETGPNENLTERSLQDAQRLFLMSEAVQPVTPEPCVTQDSVRFSHLVVDLVQAKDTLYHVLYIGTESGTILKALSTASRSLHGCYLEELHVLPPGRREPLRSLRILHSARALFVGLRDGVLRVPLERCAAYRSQGACLGARDPYCGWDGKQQRCSTLEDSSNMSLWTQNITACPVRNVTRDGGFGPWSPWQPCEHLDGDNSGSCLCRARSCDSPRPRCGGLDCLGPAIHIANCSRNGAWTPWSSWALCSTSCGIGFQVRQRSCSNPAPRHGGRICVGKSREERFCNENTPCPVPIFWASWGSWSKCSSNCGGGMQSRRRACENGNSCLGCGVEFKTCNPEGCPEVRRNTPWTPWLPVNVTQGGARQEQRFRFTCRAPLADPHGLQFGRRRTETRTCPADGSGSCDTDALVEDLLRSGSTSPHTVSGGWAAWGPWSSCSRDCELGFRVRKRTCTNPEPRNGGLPCVGDAAEYQDCNPQACPVRGAWSCWTSWSPCSASCGGGHYQRTRSCTSPAPSPGEDICLGLHTEEALCATQACPEGWSPWSEWSKCTDDGAQSRSRHCEELLPGSSACAGNSSQSRPCPYSEIPVILPASSMEEATGCAGFNLIHLVATGISCFLGSGLLTLAVYLSCQHCQRQSQESTLVHPATPNHLHYKGGGTPKNEKYTPMEFKTLNKNNLIPDDRANFYPLQQTNVYTTTYYPSPLNKHSFRPEASPGQRCFPNS

SEQ ID NO: 56 - DNA, 3411 bp, Homo sapiens
  CDS (1)...(3411)
atgccctgtggcttcagtccgtctcctgttgcccaccacctcgtccctgggccgcctgataccccagcccaacagctaaggtgtggatggacagtagggggctggcttctctcactggtcaggggtcttctcccctgtctgcctcccggagctaggactgcagaggggcctatcatggtgcttgcaggccccctggctgtctcgctgttgctgcccagcctcacactgctggtgtcccacctctccagctcccaggatgtctccagtgagcccagcagtgagcagcagctgtgcgcccttagcaagcaccccaccgtggcctttgaagacctgcagccgtgggtctctaacttcacctaccctggagcccgggatttctcccagctggctttggacccctccgggraccagctcatcgtgggagccaggaactacctcttcagactcagccttgccaatgtctctcttcttcaggccacagagtgggcctccagtgaggacacgcgccgctcctgccaaagcaaagggaagactgaggaggagtgtcagaactacgtgcgagtcctgatcgtcgccggccggaaggtgttcatgtgtggaaccaatgccttttcccccatgtgcaccagcagacaggtggggaacctcagccggactattgagaagatcaatggtgtggcccgctgcccctatgacccacgccacaactccacagctgtcatctcctcccagggggagctctatgcagccacggtcatcgacttctcaggtcgggaccctgccatctaccgcagcctgggcagtgggccaccgcttcgcactgcccaatataactccaagtggcttaatgagccaaacttcgtggcagcctatgatattgggctgtttgcatacttcttcctgcgggagaacgcagtggagcacgactgtggacgcaccgtgtactctcgcgtggcccgcgtgtgcaagaatgacgtggggggccgattcctgctggaggacacatggaccacattcatgaaggcccggctcaactgctcccgcccgggcgaggtccccttctactataacgagctgcagagtgccttccacttgccrgagcaggacctcatctatggagttttcacaaccaacgtaaacagcatygcggcttctgctgtctgcgccttcaacctcagtgctatctcccaggctttcaatggcccatttcgctaccaggagaaccccagggctgcctggctccccatagccaaccccatccccaatttccagtgtggcaccctgcctgagaccggtcccaacgagaacctgacggagcgcagcctgcaggacgcgcagcgcctcttcctgatgagcgaggccgtgcagccggtgacacccgagccctgtgtcacccaggacagcgtgcgcttctcacacctcgtggtggacctggtgcaggctaaagacacgctctaccatgtactctacattggcaccgagtcgggcaccatcctgaaggcgctgtccacggcgagccgcagcctccacggctgctacctggaggagctgcacgtgctgccccccgggcgccgcgagcccctgcgcagcctgcgcatcctgcacagcgcccgcgcgctcttcgtggggctgagagacggcgtcctgcgggtcccactggagaggtgcgccgcctaccgcagccagggggcatgcctgggggcccgggacccgtactgtggctgggacgggaagcagcaacgttgcagcacactcgaggacagctccaacatgagcctctggacccagaacatcaccgcctgtcctgtgcggaatgtgacacgggatgggggcttcggcccatggtcaccatggcaaccatgtgagcacttggatggggacaactcaggctcttgcctgtgtcgagctcgatcctgtgattcccctcgaccccgctgtgggggccttgactgcctggggccagccatccacatcgccaactgctccaggaatggggcgtggaccccgtggtcatcgtgggcgctgtgcagcacgtcctgtggcatcggcttccaggtccgccagcgaagttgcagcaaccctgctccccgccacgggggccgcatctgcgtgggcaagagccgggaggaacggttctgtaatgagaacacgccttgcccggtgcccatcttctgggcttcctggggctcctggagcaagtgcagcagcaactgtggagggggcatgcagtcgcggcgtcgggcctgcgagaacggcaactcctgcctgggctgcggcgtggagttcaagacgtgcaaccccgagggctgccccgaagtgcggcgcaacaccccctggacgccgtggctgcccgtgaacgtgacgcagggcggggcacggcaggagcagcggttccgcttcacctgccgcgcgccccttgcagacccgcacggcctgcagttcggcaggagaaggaccgagacgaggacctgtcccgcggacggctccggctcctgcgacaccgacgccctggtggaggacctcctgcgcagcgggagcacctccccgcacacggtgagcgggggctgggccgcctggggcccgtggtcgtcctgctcccgggactgcgagctgggcttccgcgtccgcaagagaacgtgcactaacccggagccccgcaacgggggcctgccctgcgtgggcgatgctgccgagtaccaggactgcaacccccaggcttgcccagttcggggtgcttggtcctgctggacctcatggtctccatgctcagcttcctgtggtgggggtcactatcaacgcacccgttcctgcaccagccccgcaccctccccaggtgaggacatctgtctcgggctgcacacggaggaggcactatgtgccacacaggcctgcccagaaggctggtcgccctggtctgagtggagtaagtgcactgacgacggagcccagagccgaagccggcactgtgaggagctcctcccagggtccagcgcctgtgctggaaacagcagccagagccgcccctgcccctacagcgagattcccgggttcaatctcatccacttggtggccacgggcatctcctgcttcttgggctctgggctcctgaccctagcagtgtacctgtcttgccagcactgccagcgtcagtcccaggagtccacactggtccatcctgccacccccaaccatttgcactacaagggcggaggcaccccgaagaatgaaaagtacacacccatggaattcaagaccctgaacaagaataacttgatccctgatgacagagccaacttctacccattgcagcagaccaatgtgtacacgactacttactacccaagccccctgaacaaacacagcttccggcccgaggcctcacctggacaacggtgcttccccaacagctga

SEQ ID NO: 57 - protein, 1136 aa, Homo sapiens
  VARIANT (1)...(1136): Xaa = Any Amino Acid
MPCGFSPSPVAHHLVPGPPDTPAQQLRCGWTVGGWLLSLVRGLLPCLPPGARTAEGPIMVLAGPLAVSLLLPSLTLLVSHLSSSQDVSSEPSSEQQLCALSKHPTVAFEDLQPWVSNFTYPGARDFSQLALDPSGXQLIVGARNYLFRLSLANVSLLQATEWASSEDTRRSCQSKGKTEEECQNYVRVLIVAGRKVFMCGTNAFSPMCTSRQVGNLSRTIEKINGVARCPYDPRHNSTAVISSQGELYAATVIDFSGRDPAIYRSLGSGPPLRTAQYNSKWLNEPNFVAAYDIGLFAYFFLRENAVEHDCGRTVYSRVARVCKNDVGGRFLLEDTWTTFMKARLNCSRPGEVPFYYNELQSAFHLXEQDLIYGVFTTNVNSXAASAVCAFNLSAISQAFNGPFRYQENPRAAWLPIANPIPNFQCGTLPETGPNENLTERSLQDAQRLFLMSEAVQPVTPEPCVTQDSVRFSHLVVDLVQAKDTLYHVLYIGTESGTILKALSTASRSLHGCYLEELHVLPPGRREPLRSLRILHSARALFVGLRDGVLRVPLERCAAYRSQGACLGARDPYCGWDGKQQRCSTLEDSSNMSLWTQNITACPVRNVTRDGGFGPWSPWQPCEHLDGDNSGSCLCRARSCDSPRPRCGGLDCLGPAIHIANCSRNGAWTPWSSWALCSTSCGIGFQVRQRSCSNPAPRHGGRICVGKSREERFCNENTPCPVPIFWASWGSWSKCSSNCGGGMQSRRRACENGNSCLGCGVEFKTCNPEGCPEVRRNTPWTPWLPVNVTQGGARQEQRFRFTCRAPLADPHGLQFGRRRTETRTCPADGSGSCDTDALVEDLLRSGSTSPHTVSGGWAAWGPWSSCSRDCELGFRVRKRTCTNPEPRNGGLPCVGDAAEYQDCNPQACPVRGAWSCWTSWSPCSASCGGGHYQRTRSCTSPAPSPGEDICLGLHTEEALCATQACPEGWSPWSEWSKCTDDGAQSRSRHCEELLPGSSACAGNSSQSRPCPYSEIPGFNLIHLVATGISCFLGSGLLTLAVYLSCQHCQRQSQESTLVHPATPNHLHYKGGGTPKNEKYTPMEFKTLNKNNLIPDDRANFYPLQQTNVYTTTYYPSPLNKHSFRPEASPGQRCFPNS

SEQ ID NO: 58 - DNA, 2865 bp, Homo sapiens
  CDS (1)...(2865)
atgtgtggaaccaatgccttttcccccatgtgcaccagcagacaggtggggaacctcagccggactattgagaagatcaatggtgtggcccgctgcccctatgacccacgccacaactccacagctgtcatctcctcccagggggagctctatgcagccacggtcatcgacttctcaggtcgggaccctgccatctaccgcagcctgggcagtgggccaccgcttcgcactgcccaatataactccaagtggcttaatgagccaaacttcgtggcagcctatgatattgggctgtttgcatacttcttcctgcgggagaacgcagtggagcacgactgtggacgcaccgtgtactctcgcgtggcccgcgtgtgcaagaatgacgtggggggccgattcctgctggaggacacatggaccacattcatgaaggcccggctcaactgctcccgcccgggcgaggtccccttctactataacgagctgcagagtgccttccacttgccrgagcaggacctcatctatggagttttcacaaccaacgtaaacagcatygcggcttctgctgtctgcgccttcaacctcagtgctatctcccaggctttcaatggcccatttcgctaccaggagaaccccagggctgcctggctccccatagccaaccccatccccaatttccagtgtggcaccctgcctgagaccggtcccaacgagaacctgacggagcgcagcctgcaggacgcgcagcgcctcttcctgatgagcgaggccgtgcagccggtgacacccgagccctgtgtcacccaggacagcgtgcgcttctcacacctcgtggtggacctggtgcaggctaaagacacgctctaccatgtactctacattggcaccgagtcgggcaccatcctgaaggcgctgtccacggcgagccgcagcctccacggctgctacctggaggagctgcacgtgctgccccccgggcgccgcgagcccctgcgcagcctgcgcatcctgcacagcgcccgcgcgctcttcgtggggctgagagacggcgtcctgcgggtcccactggagaggtgcgccgcctaccgcagccagggggcatgcctgggggcccgggacccgtactgtggctgggacgggaagcagcaacgttgcagcacactcgaggacagctccaacatgagcctctggacccagaacatcaccgcctgtcctgtgcggaatgtgacacgggatgggggcttcggcccatggtcaccatggcaaccatgtgagcacttggatggggacaactcaggctcttgcctgtgtcgagctcgatcctgtgattcccctcgaccccgctgtgggggccttgactgcctggggccagccatccacatcgccaactgctccaggaatggggcgtggaccccgtggtcatcgtgggcgctgtgcagcacgtcctgtggcatcggcttccaggtccgccagcgaagttgcagcaaccctgctccccgccacgggggccgcatctgcgtgggcaagagccgggaggaacggttctgtaatgagaacacgccttgcccggtgcccatcttctgggcttcctggggctcctggagcaagtgcagcagcaactgtggagggggcatgcagtcgcggcgtcgggcctgcgagaacggcaactcctgcctgggctgcggcgtggagttcaagacgtgcaaccccgagggctgccccgaagtgcggcgcaacaccccctggacgccgtggctgcccgtgaacgtgacgcagggcggggcacggcaggagcagcggttccgcttcacctgccgcgcgccccttgcagacccgcacggcctgcagttcggcaggagaaggaccgagacgaggacctgtcccgcggacggctccggctcctgcgacaccgacgccctggtggaggacctcctgcgcagcgggagcacctccccgcacacggtgagcgggggctgggccgcctggggcccgtggtcgtcctgctcccgggactgcgagctgggcttccgcgtccgcaagagaacgtgcactaacccggagccccgcaacgggggcctgccctgcgtgggcgatgctgccgagtaccaggactgcaacccccaggcttgcccagttcggggtgcttggtcctgctggacctcatggtctccatgctcagcttcctgtggtgggggtcactatcaacgcacccgttcctgcaccagccccgcaccctccccaggtgaggacatctgtctcgggctgcacacggaggaggcactatgtgccacacaggcctgcccagaaggctggtcgccctggtctgagtggagtaagtgcactgacgacggagcccagagccgaagccggcactgtgaggagctcctcccagggtccagcgcctgtgctggaaacagcagccagagccgcccctgcccctacagcgagattcccgtcatcctgccagcctccagcatggaggaggccaccggctgtgcagggttcaatctcatccacttggtggccacgggcatctcctgcttcttgggctctgggctcctgaccctagcagtgtacctgtcttgccagcactgccagcgtcagtcccaggagtccacactggtccatcctgccacccccaaccatttgcactacaagggcggaggcaccccgaagaatgaaaagtacacacccatggaattcaagaccctgaacaagaataacttgatccctgatgacagagccaacttctacccattgcagcagaccaatgtgtacacgactacttactacccaagccccctgaacaaacacagcttccggcccgaggcctcacctggacaacggtgcttccccaacagctga

SEQ ID NO: 59 - protein, 954 aa, Homo sapiens
  VARIANT (1)...(954): Xaa = Any Amino Acid
MCGTNAFSPMCTSRQVGNLSRTIEKINGVARCPYDPRHNSTAVISSQGELYAATVIDFSGRDPAIYRSLGSGPPLRTAQYNSKWLNEPNFVAAYDIGLFAYFFLRENAVEHDCGRTVYSRVARVCKNDVGGRFLLEDTWTTFMKARLNCSRPGEVPFYYNELQSAFHLXEQDLIYGVFTTNVNSXAASAVCAFNLSAISQAFNGPFRYQENPRAAWLPIANPIPNFQCGTLPETGPNENLTERSLQDAQRLFLMSEAVQPVTPEPCVTQDSVRFSHLVVDLVQAKDTLYHVLYIGTESGTILKALSTASRSLHGCYLEELHVLPPGRREPLRSLRILHSARALFVGLRDGVLRVPLERCAAYRSQGACLGARDPYCGWDGKQQRCSTLEDSSNMSLWTQNITACPVRNVTRDGGFGPWSPWQPCEHLDGDNSGSCLCRARSCDSPRPRCGGLDCLGPAIHIANCSRNGAWTPWSSWALCSTSCGIGFQVRQRSCSNPAPRHGGRICVGKSREERFCNENTPCPVPIFWASWGSWSKCSSNCGGGMQSRRRACENGNSCLGCGVEFKTCNPEGCPEVRRNTPWTPWLPVNVTQGGARQEQRFRFTCRAPLADPHGLQFGRRRTETRTCPADGSGSCDTDALVEDLLRSGSTSPHTVSGGWAAWGPWSSCSRDCELGFRVRKRTCTNPEPRNGGLPCVGDAAEYQDCNPQACPVRGAWSCWTSWSPCSASCGGGHYQRTRSCTSPAPSPGEDICLGLHTEEALCATQACPEGWSPWSEWSKCTDDGAQSRSRHCEELLPGSSACAGNSSQSRPCPYSEIPVILPASSMEEATGCAGFNLIHLVATGISCFLGSGLLTLAVYLSCQHCQRQSQESTLVHPATPNHLHYKGGGTPKNEKYTPMEFKTLNKNNLIPDDRANFYPLQQTNVYTTTYYPSPLNKHSFRPEASPGQRCFPNS

SEQ ID NO: 60 - DNA, 2820 bp, Homo sapiens
  CDS (1)...(2820)
atgtgtggaaccaatgccttttcccccatgtgcaccagcagacaggtggggaacctcagccggactattgagaagatcaatggtgtggcccgctgcccctatgacccacgccacaactccacagctgtcatctcctcccagggggagctctatgcagccacggtcatcgacttctcaggtcgggaccctgccatctaccgcagcctgggcagtgggccaccgcttcgcactgcccaatataactccaagtggcttaatgagccaaacttcgtggcagcctatgatattgggctgtttgcatacttcttcctgcgggagaacgcagtggagcacgactgtggacgcaccgtgtactctcgcgtggcccgcgtgtgcaagaatgacgtggggggccgattcctgctggaggacacatggaccacattcatgaaggcccggctcaactgctcccgcccgggcgaggtccccttctactataacgagctgcagagtgccttccacttgccrgagcaggacctcatctatggagttttcacaaccaacgtaaacagcatygcggcttctgctgtctgcgccttcaacctcagtgctatctcccaggctttcaatggcccatttcgctaccaggagaaccccagggctgcctggctccccatagccaaccccatccccaatttccagtgtggcaccctgcctgagaccggtcccaacgagaacctgacggagcgcagcctgcaggacgcgcagcgcctcttcctgatgagcgaggccgtgcagccggtgacacccgagccctgtgtcacccaggacagcgtgcgcttctcacacctcgtggtggacctggtgcaggctaaagacacgctctaccatgtactctacattggcaccgagtcgggcaccatcctgaaggcgctgtccacggcgagccgcagcctccacggctgctacctggaggagctgcacgtgctgccccccgggcgccgcgagcccctgcgcagcctgcgcatcctgcacagcgcccgcgcgctcttcgtggggctgagagacggcgtcctgcgggtcccactggagaggtgcgccgcctaccgcagccagggggcatgcctgggggcccgggacccgtactgtggctgggacgggaagcagcaacgttgcagcacactcgaggacagctccaacatgagcctctggacccagaacatcaccgcctgtcctgtgcggaatgtgacacgggatgggggcttcggcccatggtcaccatggcaaccatgtgagcacttggatggggacaactcaggctcttgcctgtgtcgagctcgatcctgtgattcccctcgaccccgctgtgggggccttgactgcctggggccagccatccacatcgccaactgctccaggaatggggcgtggaccccgtggtcatcgtgggcgctgtgcagcacgtcctgtggcatcggcttccaggtccgccagcgaagttgcagcaaccctgctccccgccacgggggccgcatctgcgtgggcaagagccgggaggaacggttctgtaatgagaacacgccttgcccggtgcccatcttctgggcttcctggggctcctggagcaagtgcagcagcaactgtggagggggcatgcagtcgcggcgtcgggcctgcgagaacggcaactcctgcctgggctgcggcgtggagttcaagacgtgcaaccccgagggctgccccgaagtgcggcgcaacaccccctggacgccgtggctgcccgtgaacgtgacgcagggcggggcacggcaggagcagcggttccgcttcacctgccgcgcgccccttgcagacccgcacggcctgcagttcggcaggagaaggaccgagacgaggacctgtcccgcggacggctccggctcctgcgacaccgacgccctggtggaggacctcctgcgcagcgggagcacctccccgcacacggtgagcgggggctgggccgcctggggcccgtggtcgtcctgctcccgggactgcgagctgggcttccgcgtccgcaagagaacgtgcactaacccggagccccgcaacgggggcctgccctgcgtgggcgatgctgccgagtaccaggactgcaacccccaggcttgcccagttcggggtgcttggtcctgctggacctcatggtctccatgctcagcttcctgtggtgggggtcactatcaacgcacccgttcctgcaccagccccgcaccctccccaggtgaggacatctgtctcgggctgcacacggaggaggcactatgtgccacacaggcctgcccagaaggctggtcgccctggtctgagtggagtaagtgcactgacgacggagcccagagccgaagccggcactgtgaggagctcctcccagggtccagcgcctgtgctggaaacagcagccagagccgcccctgcccctacagcgagattcccgggttcaatctcatccacttggtggccacgggcatctcctgcttcttgggctctgggctcctgaccctagcagtgtacctgtcttgccagcactgccagcgtcagtcccaggagtccacactggtccatcctgccacccccaaccatttgcactacaagggcggaggcaccccgaagaatgaaaagtacacacccatggaattcaagaccctgaacaagaataacttgatccctgatgacagagccaacttctacccattgcagcagaccaatgtgtacacgactacttactacccaagccccctgaacaaacacagcttccggcccgaggcctcacctggacaacggtgcttccccaacagctga

SEQ ID NO: 61 - protein, 939 aa, Homo sapiens
  VARIANT (1)...(939): Xaa = Any Amino Acid
MCGTNAFSPMCTSRQVGNLSRTIEKINGVARCPYDPRHNSTAVISSQGELYAATVIDFSGRDPAIYRSLGSGPPLRTAQYNSKWLNEPNFVAAYDIGLFAYFFLRENAVEHDCGRTVYSRVARVCKNDVGGRFLLEDTWTTFMKARLNCSRPGEVPFYYNELQSAFHLXEQDLIYGVFTTNVNSXAASAVCAFNLSAISQAFNGPFRYQENPRAAWLPIANPIPNFQCGTLPETGPNENLTERSLQDAQRLFLMSEAVQPVTPEPCVTQDSVRFSHLVVDLVQAKDTLYHVLYIGTESGTILKALSTASRSLHGCYLEELHVLPPGRREPLRSLRILHSARALFVGLRDGVLRVPLERCAAYRSQGACLGARDPYCGWDGKQQRCSTLEDSSNMSLWTQNITACPVRNVTRDGGFGPWSPWQPCEHLDGDNSGSCLCRARSCDSPRPRCGGLDCLGPAIHIANCSRNGAWTPWSSWALCSTSCGIGFQVRQRSCSNPAPRHGGRICVGKSREERFCNENTPCPVPIFWASWGSWSKCSSNCGGGMQSRRRACENGNSCLGCGVEFKTCNPEGCPEVRRNTPWTPWLPVNVTQGGARQEQRFRFTCRAPLADPHGLQFGRRRTETRTCPADGSGSCDTDALVEDLLRSGSTSPHTVSGGWAAWGPWSSCSRDCELGFRVRKRTCTNPEPRNGGLPCVGDAAEYQDCNPQACPVRGAWSCWTSWSPCSASCGGGHYQRTRSCTSPAPSPGEDICLGLHTEEALCATQACPEGWSPWSEWSKCTDDGAQSRSRHCEELLPGSSACAGNSSQSRPCPYSEIPGFNLIHLVATGISCFLGSGLLTLAVYLSCQHCQRQSQESTLVHPATPNHLHYKGGGTPKNEKYTPMEFKTLNKNNLIPDDRANFYPLQQTNVYTTTYYPSPLNKHSFRPEASPGQRCFPNS

SEQ ID NO: 62 - DNA, 4074 bp, Homo sapiens
cccgcggtctcctcctccctgctctctccgagcgccgggtcgggagctagttggagcgcgggggttggtgccagagcccagctccgccgagccgggcgggtcggcagcgcatccagcggctgctgggagcccgagcgcagcgggcgcgggcccgggtggggactgcaccggagcgctgagagctggaggccgttcctgcgcggccgccccattcccagaccggccgccagcccatctggttagctcccgccgctccgcgccgcccgggagtcgggagccgcggggaaccgggcacctgcacccgcctctgggaggtcttctcccctgtctgcctcccggagctaggactgcagaggggcctatcatggtgcttgcaggccccctggctgtctcgctgttgctgcccagcctcacactgctggtgtcccacctctccagctcccaggatgtctccagtgagcccagcagtgagcagcagctgtgcgcccttagcaagcaccccaccgtggcctttgaagacctgcagccgtgggtctctaacttcacctaccctggagcccgggatttctcccagctggctttggacccctccgggraccagctcatcgtgggagccaggaactacctcttcagactcagccttgccaatgtctctcttcttcaggccacagagtgggcctccagtgaggacacgcgccgctcctgccaaagcaaagggaagactgaggaggagtgtcagaactacgtgcgagtcctgatcgtcgccggccggaaggtgttcatgtgtggaaccaatgccttttcccccatgtgcaccagcagacaggtggggaacctcagccggactattgagaagatcaatggtgtggcccgctgcccctatgacccacgccacaactccacagctgtcatctcctcccagggggagctctatgcagccacggtcatcgacttctcaggtcgggaccctgccatctaccgcagcctgggcagtgggccaccgcttcgcactgcccaatataactccaagtggcttaatgagccaaacttcgtggcagcctatgatattgggctgtttgcatacttcttcctgcgggagaacgcagtggagcacgactgtggacgcaccgtgtactctcgcgtggcccgcgtgtgcaagaatgacgtggggggccgattcctgctggaggacacatggaccacattcatgaaggcccggctcaactgctcccgcccgggcgaggtccccttctactataacgagctgcagagtgccttccacttgccrgagcaggacctcatctatggagttttcacaaccaacgtaaacagcatygcggcttctgctgtctgcgccttcaacctcagtgctatctcccaggctttcaatggcccatttcgctaccaggagaaccccagggctgcctggctccccatagccaaccccatccccaatttccagtgtggcaccctgcctgagaccggtcccaacgagaacctgacggagcgcagcctgcaggacgcgcagcgcctcttcctgatgagcgaggccgtgcagccggtgacacccgagccctgtgtcacccaggacagcgtgcgcttctcacacctcgtggtggacctggtgcaggctaaagacacgctctaccatgtactctacattggcaccgagtcgggcaccatcctgaaggcgctgtccacggcgagccgcagcctccacggctgctacctggaggagctgcacgtgctgccccccgggcgccgcgagcccctgcgcagcctgcgcatcctgcacagcgcccgcgcgctcttcgtggggctgagagacggcgtcctgcgggtcccactggagaggtgcgccgcctaccgcagccagggggcatgcctgggggcccgggacccgtactgtggctgggacgggaagcagcaacgttgcagcacactcgaggacagctccaacatgagcctctggacccagaacatcaccgcctgtcctgtgcggaatgtgacacgggatgggggcttcggcccatggtcaccatggcaaccatgtgagcacttggatggggacaactcaggctcttgcctgtgtcgagctcgatcctgtgattcccctcgaccccgctgtgggggccttgactgcctggggccagccatccacatcgccaactgctccaggaatggggcgtggaccccgtggtcatcgtgggcgctgtgcagcacgtcctgtggcatcggcttccaggtccgccagcgaagttgcagcaaccctgctccccgccacgggggccgcatctgcgtgggcaagagccgggaggaacggttctgtaatgagaacacgccttgcccggtgcccatcttctgggcttcctggggctcctggagcaagtgcagcagcaactgtggagggggcatgcagtcgcggcgtcgggcctgcgagaacggcaactcctgcctgggctgcggcgtggagttcaagacgtgcaaccccgagggctgccccgaagtgcggcgcaacaccccctggacgccgtggctgcccgtgaacgtgacgcagggcggggcacggcaggagcagcggttccgcttcacctgccgcgcgccccttgcagacccgcacggcctgcagttcggcaggagaaggaccgagacgaggacctgtcccgcggacggctccggctcctgcgacaccgacgccctggtggaggacctcctgcgcagcgggagcacctccccgcacacggtgagcgggggctgggccgcctggggcccgtggtcgtcctgctcccgggactgcgagctgggcttccgcgtccgcaagagaacgtgcactaacccggagccccgcaacgggggcctgccctgcgtgggcgatgctgccgagtaccaggactgcaacccccaggcttgcccagttcggggtgcttggtcctgctggacctcatggtctccatgctcagcttcctgtggtgggggtcactatcaacgcacccgttcctgcaccagccccgcaccctccccaggtgaggacatctgtctcgggctgcacacggaggaggcactatgtgccacacaggcctgcccagaaggctggtcgccctggtctgagtggagtaagtgcactgacgacggagcccagagccgaagccggcactgtgaggagctcctcccagggtccagcgcctgtgctggaaacagcagccagagccgcccctgcccctacagcgagattcccgtcatcctgccagcctccagcatggaggaggccaccggctgtgcagggttcaatctcatccacttggtggccacgggcatctcctgcttcttgggctctgggctcctgaccctagcagtgtacctgtcttgccagcactgccagcgtcagtcccaggagtccacactggtccatcctgccacccccaaccatttgcactacaagggcggaggcaccccgaagaatgaaaagtacacacccatggaattcaagaccctgaacaagaataacttgatccctgatgacagagccaacttctacccattgcagcagaccaatgtgtacacgactacttactacccaagccccctgaacaaacacagcttccggcccgaggcctcacctggacaacggtgcttccccaacagctgataccgccgtcctggggacttgggcttcttgccttcataaggcacagagcagatggagatgggacagtggagccagtttggttttctccctctgcactaggccaagaacttgctgccttgcctgtggggggtcccatccggcttcagagagctctggctggcattgaccatgggggaaagggctggtttcaggctgacatatggccgcaggtccagttcagcccaggtctctcatggttatcttccaacccactgtcacgctgacactatgctgccatgcctgggctgtggacctactgggcatttgaggaattggagaatggagatggcaagagggcaggcttttaagtttgggttggagacaacttcctgtggcccccacaagctgagtctggccttctccagctggccccaaaaaaggcctttgct

SEQ ID NO: 63 - DNA, 648 bp, Homo sapiens
  CDS (1)...(648)
atgtgggggaggctctggcccctcctcctcagcatcctcacagcaactgcagtcccaggaccctcactgcggagaccgtctagagaactagatgccacccctcggatgaccataccctatgaagagctctctgggacccggcacttcaagggccaagcccagaactactcaacactgctgctggaggaggcctcagcaaggctgctggtgggagcccgaggtgccctgttctctctcagtgccaacgacataggagatggggctcacaaagagatccactgggaagcctccccagagatgcaaagcaaatgtcatcaaaaagggaaaaacaaccagacggagtgctttaaccatgtgcggttcctgcagcggctcaattctacccacctctatgcatgtgggactcacgccttccagcccctctgtgcagccattgatgctgaggccttcaccttgccaaccagcttcgaggaggggaaggagaagtgtccttatgacccagcccgtggcttcacaggcctcatcattgatggaggcctctacacagccactaggtatgaattccggagcattcctgacatccgccggagccgccacccacactccctgagaactgaggagacaccaatgcattggctcaatggttag

SEQ ID NO: 64 - protein, 215 aa, Homo sapiens
MWGRLWPLLLSILTATAVPGPSLRRPSRELDATPRMTIPYEELSGTRHFKGQAQNYSTLLLEEASARLLVGARGALFSLSANDIGDGAHKEIHWEASPEMQSKCHQKGKNNQTECFNHVRFLQRLNSTHLYACGTHAFQPLCAAIDAEAFTLPTSFEEGKEKCPYDPARGFTGLIIDGGLYTATRYEFRSIPDIRRSRHPHSLRTEETPMHWLNG

SEQ ID NO: 65 - DNA, 1491 bp, Homo sapiens
  CDS (1)...(1491)
atgtgggggaggctctggcccctcctcctcagcatcctcacagcaactgcagtcccaggaccctcactgcggagaccgtctagagaactagatgccacccctcggatgaccataccctatgaagagctctctgggacccggcacttcaagggccaagcccagaactactcaacactgctgctggaggaggcctcagcaaggctgctggtgggagcccgaggtgccctgttctctctcagtgccaacgacataggagatggggctcacaaagagatccactgggaagcctccccagagatgcaaagcaaatgtcatcaaaaagggaaaaacaaccagacggagtgctttaaccatgtgcggttcctgcagcggctcaattctacccacctctatgcatgtgggactcacgccttccagcccctctgtgcagccattgatgctgaggccttcaccttgccaaccagcttcgaggaggggaaggagaagtgtccttatgacccagcccgtggcttcacaggcctcatcattgatggaggcctctacacagccactaggtatgaattccggagcattcctgacatccgccggagccgccacccacactccctgagaactgaggagacaccaatgcattggctcaatgatgcggagtttgtgttctccgtcctcgtgcgggagagcaaggccagtgcagtgggtgatgatgacaaggtgtactacttcttcacggagcgtgccactgaggagggctctggcagcttcactcagagccgcagcagtcaccgtgtggcccgtgtggctcgygtctgcaagggagacctgggagggaagaagatcctgcagaagaagtggacttccttcctgaaagcccgtctcatctgccacattccactgtatgagacactgcgtggggtctgcagcctggatgctgaaacctcaagccgtacacacttctatgcagccttcacgctgagcacacagtggaagaccctggaggcctcagccatctgccgctatgacctggcagagatccaggctgtctttgcaggaccctatatggaataccaggatggttcccggcgctggggtcgctatgagggtggggtgcctgagccccggcctggctcgtgtatcacagattcattgcgcagccaaggctacaattcatcccaagacttgccatccctggtcctggactttgtaaagttgcacccactgatggctcggcccgttgtgcccacacgtggacggcccctgctgctcaagcgcaacatacgctacacacaccttacagggacacctgtcaccacgcctgctggacctacctatgacctgctctttctgggcacagctgatggctggatccacaaggccgtagtcctgggctctgggatgcacattattgaagagacacaagtgttcagggagtcccagtctgtggaaaatctagtcatctctctattgcaggtagcccttctctgtgacccttaa

SEQ ID NO: 66 - protein, 496 aa, Homo sapiens
  VARIANT (1)...(496): Xaa = Any Amino Acid
MWGRLWPLLLSILTATAVPGPSLRRPSRELDATPRMTIPYEELSGTRHFKGQAQNYSTLLLEEASARLLVGARGALFSLSANDIGDGAHKEIHWEASPEMQSKCHQKGKNNQTECFNHVRFLQRLNSTHLYACGTHAFQPLCAAIDAEAFTLPTSFEEGKEKCPYDPARGFTGLIIDGGLYTATRYEFRSIPDIRRSRHPHSLRTEETPMHWLNDAEFVFSVLVRESKASAVGDDDKVYYFFTERATEEGSGSFTQSRSSHRVARVAXVCKGDLGGKKILQKKWTSFLKARLICHIPLYETLRGVCSLDAETSSRTHFYAAFTLSTQWKTLEASAICRYDLAEIQAVFAGPYMEYQDGSRRWGRYEGGVPEPRPGSCITDSLRSQGYNSSQDLPSLVLDFVKLHPLMARPVVPTRGRPLLLKRNIRYTHLTGTPVTTPAGPTYDLLFLGTADGWIHKAVVLGSGMHIIEETQVFRESQSVENLVISLLQVALLCDP

SEQ ID NO: 67 - DNA, 2109 bp, Homo sapiens
  CDS (1)...(2109)
atgtgggggaggctctggcccctcctcctcagcatcctcacagcaactgcagtcccaggaccctcactgcggagaccgtctagagaactagatgccacccctcggatgaccataccctatgaagagctctctgggacccggcacttcaagggccaagcccagaactactcaacactgctgctggaggaggcctcagcaaggctgctggtgggagcccgaggtgccctgttctctctcagtgccaacgacataggagatggggctcacaaagagatccactgggaagcctccccagagatgcaaagcaaatgtcatcaaaaagggaaaaacaaccagacggagtgctttaaccatgtgcggttcctgcagcggctcaattctacccacctctatgcatgtgggactcacgccttccagcccctctgtgcagccattgatgctgaggccttcaccttgccaaccagcttcgaggaggggaaggagaagtgtccttatgacccagcccgtggcttcacaggcctcatcattgatggaggcctctacacagccactaggtatgaattccggagcattcctgacatccgccggagccgccacccacactccctgagaactgaggagacaccaatgcattggctcaatgatgcggagtttgtgttctccgtcctcgtgcgggagagcaaggccagtgcagtgggtgatgatgacaaggtgtactacttcttcacggagcgtgccactgaggagggctctggcagcttcactcagagccgcagcagtcaccgtgtggcccgtgtggctcgygtctgcaagggagacctgggagggaagaagatcctgcagaagaagtggacttccttcctgaaagcccgtctcatctgccacattccactgtatgagacactgcgtggggtctgcagcctggatgctgaaacctcaagccgtacacacttctatgcagccttcacgctgagcacacagtggaagaccctggaggcctcagccatctgccgctatgacctggcagagatccaggctgtctttgcaggaccctatatggaataccaggatggttcccggcgctggggtcgctatgagggtggggtgcctgagccccggcctggctcgtgtatcacagattcattgcgcagccaaggctacaattcatcccaagacttgccatccctggtcctggactttgtaaagttgcacccactgatggctcggcccgttgtgcccacacgtggacggcccctgctgctcaagcgcaacatacgctacacacaccttacagggacacctgtcaccacgcctgctggacctacctatgacctgctctttctgggcacagctgatggctggatccacaaggccgtagtcctgggctctgggatgcacattattgaagagacacaagtgttcagggagtcccagtctgtggaaaatctagtcatctctctattgcagcacagcctctatgtgggggctcctagcggagtcatccagctaccactctccagctgctcccgctaccgatcctgctatgactgcatcttggcccgagacccctactgtggctgggaccctggcacccatgcctgcgcagcagccaccaccatagccaacaggtcccagggaagcaggacagcactgatacaggacatagagagaggaaatcgaggctgtgagagcagcagggatacaggcagggctctgcaggtccatatgggctcaatgtcaccaccctctgcatggccctgtgtgctggatggtcctgaaaccagacaagtcctctgccagccacctaagccctgcgtacattcacatgcacacatggaagaatgtttatcggctgggctgcagtgcccccaccctcaccttctcctggtgcattcttgtttcatccctgcttctggacttggggtaccctcccaattgccacatcctatctggtcctcttccccagccccatgtggtgacctctttgtcaagagcttgggaacgggccagcctggggaggtaagactgcatcactcccctcctctcccttcctgtgtggcccttgtgaatcagcctccccactctccttggtcattctcaagagtatga

SEQ ID NO: 68 - protein, 702 aa, Homo sapiens
  VARIANT (1)...(702): Xaa = Any Amino Acid
MWGRLWPLLLSILTATAVPGPSLRRPSRELDATPRMTIPYEELSGTRHFKGQAQNYSTLLLEEASARLLVGARGALFSLSANDIGDGAHKEIHWEASPEMQSKCHQKGKNNQTECFNHVRFLQRLNSTHLYACGTHAFQPLCAAIDAEAFTLPTSFEEGKEKCPYDPARGFTGLIIDGGLYTATRYEFRSIPDIRRSRHPHSLRTEETPMHWLNDAEFVFSVLVRESKASAVGDDDKVYYFFTERATEEGSGSFTQSRSSHRVARVAXVCKGDLGGKKILQKKWTSFLKARLICHIPLYETLRGVCSLDAETSSRTHFYAAFTLSTQWKTLEASAICRYDLAEIQAVFAGPYMEYQDGSRRWGRYEGGVPEPRPGSCITDSLRSQGYNSSQDLPSLVLDFVKLHPLMARPVVPTRGRPLLLKRNIRYTHLTGTPVTTPAGPTYDLLFLGTADGWIHKAVVLGSGMHIIEETQVFRESQSVENLVISLLQHSLYVGAPSGVIQLPLSSCSRYRSCYDCILARDPYCGWDPGTHACAAATTIANRSQGSRTALIQDIERGNRGCESSRDTGRALQVHMGSMSPPSAWPCVLDGPETRQVLCQPPKPCVHSHAHMEECLSAGLQCPHPHLLLVHSCFIPASGLGVPSQLPHPIWSSSPAPCGDLFVKSLGTGQPGEVRLHHSPPLPSCVALVNQPPHSPWSFSRV

SEQ ID NO: 69 - DNA, 2094 bp, Homo sapiens
  CDS (1)...(2094)
atgtgggggaggctctggcccctcctcctcagcatcctcacagcaactgcagtcccaggaccctcactgcggagaccgtctagagaactagatgccacccctcggatgaccataccctatgaagagctctctgggacccggcacttcaagggccaagcccagaactactcaacactgctgctggaggaggcctcagcaaggctgctggtgggagcccgaggtgccctgttctctctcagtgccaacgacataggagatggggctcacaaagagatccactgggaagcctccccagagatgcaaagcaaatgtcatcaaaaagggaaaaacaaccagacggagtgctttaaccatgtgcggttcctgcagcggctcaattctacccacctctatgcatgtgggactcacgccttccagcccctctgtgcagccattgatgctgaggccttcaccttgccaaccagcttcgaggaggggaaggagaagtgtccttatgacccagcccgtggcttcacaggcctcatcattgatggaggcctctacacagccactaggtatgaattccggagcattcctgacatccgccggagccgccacccacactccctgagaactgaggagacaccaatgcattggctcaatgatgcggagtttgtgttctccgtcctcgtgcgggagagcaaggccagtgcagtgggtgatgatgacaaggtgtactacttcttcacggagcgtgccactgaggagggctctggcagcttcactcagagccgcagcagtcaccgtgtggcccgtgtggctcgygtctgcaagggagacctgggagggaagaagatcctgcagaagaagtggacttccttcctgaaagcccgtctcatctgccacattccactgtatgagacactgcgtggggtctgcagcctggatgctgaaacctcaagccgtacacacttctatgcagccttcacgctgagcacacagtggaagaccctggaggcctcagccatctgccgctatgacctggcagagatccaggctgtctttgcaggaccctatatggaataccaggatggttcccggcgctggggtcgctatgagggtggggtgcctgagccccggcctggctcgtgtatcacagattcattgcgcagccaaggctacaattcatcccaagacttgccatccctggtcctggactttgtaaagttgcacccactgatggctcggcccgttgtgcccacacgtggacggcccctgctgctcaagcgcaacatacgctacacacaccttacagggacacctgtcaccacgcctgctggacctacctatgacctgctctttctgggcacagctgatggctggatccacaaggccgtagtcctgggctctgggatgcacattattgaagagacacaagtgttcagggagtcccagtctgtggaaaatctagtcatctctctattgcagcacagcctctatgtgggggctcctagcggagtcatccagctaccactctccagctgctcccgctaccgatcctgctatgactgcatcttggcccgagacccctactgtggctgggaccctggcacccatgcctgcgcagcagccaccaccatagccaacaggacagcactgatacaggacatagagagaggaaatcgaggctgtgagagcagcagggatacaggcagggctctgcaggtccatatgggctcaatgtcaccaccctctgcatggccctgtgtgctggatggtcctgaaaccagacaagtcctctgccagccacctaagccctgcgtacattcacatgcacacatggaagaatgtttatcggctgggctgcagtgcccccaccctcaccttctcctggtgcattcttgtttcatccctgcttctggacttggggtaccctcccaattgccacatcctatctggtcctcttccccagccccatgtggtgacctctttgtcaagagcttgggaacgggccagcctggggaggtaagactgcatcactcccctcctctcccttcctgtgtggcccttgtgaatcagcctccccactctccttggtcattctcaagagtatga

SEQ ID NO: 70 - protein, 697 aa, Homo sapiens
  VARIANT (1)...(697): Xaa = Any Amino Acid
MWGRLWPLLLSILTATAVPGPSLRRPSRELDATPRMTIPYEELSGTRHFKGQAQNYSTLLLEEASARLLVGARGALFSLSANDIGDGAHKEIHWEASPEMQSKCHQKGKNNQTECFNHVRFLQRLNSTHLYACGTHAFQPLCAAIDAEAFTLPTSFEEGKEKCPYDPARGFTGLIIDGGLYTATRYEFRSIPDIRRSRHPHSLRTEETPMHWLNDAEFVFSVLVRESKASAVGDDDKVYYFFTERATEEGSGSFTQSRSSHRVARVAXVCKGDLGGKKILQKKWTSFLKARLICHIPLYETLRGVCSLDAETSSRTHFYAAFTLSTQWKTLEASAICRYDLAEIQAVFAGPYMEYQDGSRRWGRYEGGVPEPRPGSCITDSLRSQGYNSSQDLPSLVLDFVKLHPLMARPVVPTRGRPLLLKRNIRYTHLTGTPVTTPAGPTYDLLFLGTADGWIHKAVVLGSGMHIIEETQVFRESQSVENLVISLLQHSLYVGAPSGVIQLPLSSCSRYRSCYDCILARDPYCGWDPGTHACAAATTIANRTALIQDIERGNRGCESSRDTGRALQVHMGSMSPPSAWPCVLDGPETRQVLCQPPKPCVHSHAHMEECLSAGLQCPHPHLLLVHSCFIPASGLGVPSQLPHPIWSSSPAPCGDLFVKSLGTGQPGEVRLHHSPPLPSCVALVNQPPHSPWSFSRV

SEQ ID NO: 71 - DNA, 2532 bp, Homo sapiens
  CDS (1)...(2532)
atgtgggggaggctctggcccctcctcctcagcatcctcacagcaactgcagtcccaggaccctcactgcggagaccgtctagagaactagatgccacccctcggatgaccataccctatgaagagctctctgggacccggcacttcaagggccaagcccagaactactcaacactgctgctggaggaggcctcagcaaggctgctggtgggagcccgaggtgccctgttctctctcagtgccaacgacataggagatggggctcacaaagagatccactgggaagcctccccagagatgcaaagcaaatgtcatcaaaaagggaaaaacaaccagacggagtgctttaaccatgtgcggttcctgcagcggctcaattctacccacctctatgcatgtgggactcacgccttccagcccctctgtgcagccattgatgctgaggccttcaccttgccaaccagcttcgaggaggggaaggagaagtgtccttatgacccagcccgtggcttcacaggcctcatcattgatggaggcctctacacagccactaggtatgaattccggagcattcctgacatccgccggagccgccacccacactccctgagaactgaggagacaccaatgcattggctcaatgatgcggagtttgtgttctccgtcctcgtgcgggagagcaaggccagtgcagtgggtgatgatgacaaggtgtactacttcttcacggagcgtgccactgaggagggctctggcagcttcactcagagccgcagcagtcaccgtgtggcccgtgtggctcgygtctgcaagggagacctgggagggaagaagatcctgcagaagaagtggacttccttcctgaaagcccgtctcatctgccacattccactgtatgagacactgcgtggggtctgcagcctggatgctgaaacctcaagccgtacacacttctatgcagccttcacgctgagcacacagtggaagaccctggaggcctcagccatctgccgctatgacctggcagagatccaggctgtctttgcaggaccctatatggaataccaggatggttcccggcgctggggtcgctatgagggtggggtgcctgagccccggcctggctcgtgtatcacagattcattgcgcagccaaggctacaattcatcccaagacttgccatccctggtcctggactttgtaaagttgcacccactgatggctcggcccgttgtgcccacacgtggacggcccctgctgctcaagcgcaacatacgctacacacaccttacagggacacctgtcaccacgcctgctggacctacctatgacctgctctttctgggcacagctgatggctggatccacaaggccgtagtcctgggctctgggatgcacattattgaagagacacaagtgttcagggagtcccagtctgtggaaaatctagtcatctctctattgcagcacagcctctatgtgggggctcctagcggagtcatccagctaccactctccagctgctcccgctaccgatcctgctatgactgcatcttggcccgagacccctactgtggctgggaccctggcacccatgcctgcgcagcagccaccaccatagccaacaggtcccagggaagcaggacagcactgatacaggacatagagagaggaaatcgaggctgtgagagcagcagggatacagggccaccaccaccactgaagacccgctctgtgctccggggtgatgatgtcctcctgccctgtgaccagccatccaacctggcccgggccttgtggctactcaatgggagcatgggcctgagcgatgggcagggtggctaccgtgtgggcgtggacgggctgctggttacagatgcacagcctgagcacagtggcaactatggctgctatgccgaggaaaatggcctccgcaccctgctggcctcctatagtctcacagtccggccagccactcctgccccagctccaaaagcccctgccacacctggggcacagctggcacctgatgtgagactgctctatgtgctagccattgccgcgcttggtggccyctgcctcatcctggcctcctccctcctctatgtggcctgtctgcgggaaggcagacgagggcgccgacggaaatactcactgggtcgggccagccgggcaggaggatctgcggtgcaactgcagacagtctcaggccagtgtcctggagaggaagatgagggtgatgatgagggggctgggggcctggagggcagctgtctccagatcatccctggggagggagccccagccccaccacccccaccgcccccaccgccaccggctgagctgaccaatggcttggtggcactgcccagccggctgcggaggatgaatggcaatagctatgtgcttctgaggcagagcaacaatggagtaccagcagggccctgctccttcgccgaggaactcagccgcatcctggaaaaaaggaagcacacgcagctcgtggagcagctagatgagagctctgtctga

SEQ ID NO: 72 - protein, 843 aa, Homo sapiens
  VARIANT (1)...(843): Xaa = Any Amino Acid
MWGRLWPLLLSILTATAVPGPSLRRPSRELDATPRMTIPYEELSGTRHFKGQAQNYSTLLLEEASARLLVGARGALFSLSANDIGDGAHKEIHWEASPEMQSKCHQKGKNNQTECFNHVRFLQRLNSTHLYACGTHAFQPLCAAIDAEAFTLPTSFEEGKEKCPYDPARGFTGLIIDGGLYTATRYEFRSIPDIRRSRHPHSLRTEETPMHWLNDAEFVFSVLVRESKASAVGDDDKVYYFFTERATEEGSGSFTQSRSSHRVARVAXVCKGDLGGKKILQKKWTSFLKARLICHIPLYETLRGVCSLDAETSSRTHFYAAFTLSTQWKTLEASAICRYDLAEIQAVFAGPYMEYQDGSRRWGRYEGGVPEPRPGSCITDSLRSQGYNSSQDLPSLVLDFVKLHPLMARPVVPTRGRPLLLKRNIRYTHLTGTPVTTPAGPTYDLLFLGTADGWIHKAVVLGSGMHIIEETQVFRESQSVENLVISLLQHSLYVGAPSGVIQLPLSSCSRYRSCYDCILARDPYCGWDPGTHACAAATTIANRSQGSRTALIQDIERGNRGCESSRDTGPPPPLKTRSVLRGDDVLLPCDQPSNLARALWLLNGSMGLSDGQGGYRVGVDGLLVTDAQPEHSGNYGCYAEENGLRTLLASYSLTVRPATPAPAPKAPATPGAQLAPDVRLLYVLAIAALGGXCLILASSLLYVACLREGRRGRRRKYSLGRASRAGGSAVQLQTVSGQCPGEEDEGDDEGAGGLEGSCLQIIPGEGAPAPPPPPPPPPPAELTNGLVALPSRLRRMNGNSYVLLRQSNNGVPAGPCSFAEELSRILEKRKHTQLVEQLDESSV

SEQ ID NO: 73 - DNA, 2517 bp, Homo sapiens
  CDS (1)...(2517)
atgtgggggaggctctggcccctcctcctcagcatcctcacagcaactgcagtcccaggaccctcactgcggagaccgtctagagaactagatgccacccctcggatgaccataccctatgaagagctctctgggacccggcacttcaagggccaagcccagaactactcaacactgctgctggaggaggcctcagcaaggctgctggtgggagcccgaggtgccctgttctctctcagtgccaacgacataggagatggggctcacaaagagatccactgggaagcctccccagagatgcaaagcaaatgtcatcaaaaagggaaaaacaaccagacggagtgctttaaccatgtgcggttcctgcagcggctcaattctacccacctctatgcatgtgggactcacgccttccagcccctctgtgcagccattgatgctgaggccttcaccttgccaaccagcttcgaggaggggaaggagaagtgtccttatgacccagcccgtggcttcacaggcctcatcattgatggaggcctctacacagccactaggtatgaattccggagcattcctgacatccgccggagccgccacccacactccctgagaactgaggagacaccaatgcattggctcaatgatgcggagtttgtgttctccgtcctcgtgcgggagagcaaggccagtgcagtgggtgatgatgacaaggtgtactacttcttcacggagcgtgccactgaggagggctctggcagcttcactcagagccgcagcagtcaccgtgtggcccgtgtggctcgygtctgcaagggagacctgggagggaagaagatcctgcagaagaagtggacttccttcctgaaagcccgtctcatctgccacattccactgtatgagacactgcgtggggtctgcagcctggatgctgaaacctcaagccgtacacacttctatgcagccttcacgctgagcacacagtggaagaccctggaggcctcagccatctgccgctatgacctggcagagatccaggctgtctttgcaggaccctatatggaataccaggatggttcccggcgctggggtcgctatgagggtggggtgcctgagccccggcctggctcgtgtatcacagattcattgcgcagccaaggctacaattcatcccaagacttgccatccctggtcctggactttgtaaagttgcacccactgatggctcggcccgttgtgcccacacgtggacggcccctgctgctcaagcgcaacatacgctacacacaccttacagggacacctgtcaccacgcctgctggacctacctatgacctgctctttctgggcacagctgatggctggatccacaaggccgtagtcctgggctctgggatgcacattattgaagagacacaagtgttcagggagtcccagtctgtggaaaatctagtcatctctctattgcagcacagcctctatgtgggggctcctagcggagtcatccagctaccactctccagctgctcccgctaccgatcctgctatgactgcatcttggcccgagacccctactgtggctgggaccctggcacccatgcctgcgcagcagccaccaccatagccaacaggacagcactgatacaggacatagagagaggaaatcgaggctgtgagagcagcagggatacagggccaccaccaccactgaagacccgctctgtgctccggggtgatgatgtcctcctgccctgtgaccagccatccaacctggcccgggccttgtggctactcaatgggagcatgggcctgagcgatgggcagggtggctaccgtgtgggcgtggacgggctgctggttacagatgcacagcctgagcacagtggcaactatggctgctatgccgaggaaaatggcctccgcaccctgctggcctcctatagtctcacagtccggccagccactcctgccccagctccaaaagcccctgccacacctggggcacagctggcacctgatgtgagactgctctatgtgctagccattgccgcgcttggtggccyctgcctcatcctggcctcctccctcctctatgtggcctgtctgcgggaaggcagacgagggcgccgacggaaatactcactgggtcgggccagccgggcaggaggatctgcggtgcaactgcagacagtctcaggccagtgtcctggagaggaagatgagggtgatgatgagggggctgggggcctggagggcagctgtctccagatcatccctggggagggagccccagccccaccacccccaccgcccccaccgccaccggctgagctgaccaatggcttggtggcactgcccagccggctgcggaggatgaatggcaatagctatgtgcttctgaggcagagcaacaatggagtaccagcagggccctgctccttcgccgaggaactcagccgcatcctggaaaaaaggaagcacacgcagctcgtggagcagctagatgagagctctgtctga

SEQ ID NO: 74 - protein, 838 aa, Homo sapiens
  VARIANT (1)...(838): Xaa = Any Amino Acid
MWGRLWPLLLSILTATAVPGPSLRRPSRELDATPRMTIPYEELSGTRHFKGQAQNYSTLLLEEASARLLVGARGALFSLSANDIGDGAHKEIHWEASPEMQSKCHQKGKNNQTECFNHVRFLQRLNSTHLYACGTHAFQPLCAAIDAEAFTLPTSFEEGKEKCPYDPARGFTGLIIDGGLYTATRYEFRSIPDIRRSRHPHSLRTEETPMHWLNDAEFVFSVLVRESKASAVGDDDKVYYFFTERATEEGSGSFTQSRSSHRVARVAXVCKGDLGGKKILQKKWTSFLKARLICHIPLYETLRGVCSLDAETSSRTHFYAAFTLSTQWKTLEASAICRYDLAEIQAVFAGPYMEYQDGSRRWGRYEGGVPEPRPGSCITDSLRSQGYNSSQDLPSLVLDFVKLHPLMARPVVPTRGRPLLLKRNIRYTHLTGTPVTTPAGPTYDLLFLGTADGWIHKAVVLGSGMHIIEETQVFRESQSVENLVISLLQHSLYVGAPSGVIQLPLSSCSRYRSCYDCILARDPYCGWDPGTHACAAATTIANRTALIQDIERGNRGCESSRDTGPPPPLKTRSVLRGDDVLLPCDQPSNLARALWLLNGSMGLSDGQGGYRVGVDGLLVTDAQPEHSGNYGCYAEENGLRTLLASYSLTVRPATPAPAPKAPATPGAQLAPDVRLLYVLAIAALGGXCLILASSLLYVACLREGRRGRRRKYSLGRASRAGGSAVQLQTVSGQCPGEEDEGDDEGAGGLEGSCLQIIPGEGAPAPPPPPPPPPPAELTNGLVALPSRLRRMNGNSYVLLRQSNNGVPAGPCSFAEELSRILEKRKHTQLVEQLDESSV

SEQ ID NO: 75 - DNA, 2613 bp, Homo sapiens
  CDS (1)...(2613)
atgtgggggaggctctggcccctcctcctcagcatcctcacagcaactgcagtcccaggaccctcactgcggagaccgtctagagaactagatgccacccctcggatgaccataccctatgaagagctctctgggacccggcacttcaagggccaagcccagaactactcaacactgctgctggaggaggcctcagcaaggctgctggtgggagcccgaggtgccctgttctctctcagtgccaacgacataggagatggggctcacaaagagatccactgggaagcctccccagagatgcaaagcaaatgtcatcaaaaagggaaaaacaaccagacggagtgctttaaccatgtgcggttcctgcagcggctcaattctacccacctctatgcatgtgggactcacgccttccagcccctctgtgcagccattgatgctgaggccttcaccttgccaaccagcttcgaggaggggaaggagaagtgtccttatgacccagcccgtggcttcacaggcctcatcattgatggaggcctctacacagccactaggtatgaattccggagcattcctgacatccgccggagccgccacccacactccctgagaactgaggagacaccaatgcattggctcaatgatgcggagtttgtgttctccgtcctcgtgcgggagagcaaggccagtgcagtgggtgatgatgacaaggtgtactacttcttcacggagcgtgccactgaggagggctctggcagcttcactcagagccgcagcagtcaccgtgtggcccgtgtggctcgygtctgcaagggagacctgggagggaagaagatcctgcagaagaagtggacttccttcctgaaagcccgtctcatctgccacattccactgtatgagacactgcgtggggtctgcagcctggatgctgaaacctcaagccgtacacacttctatgcagccttcacgctgagcacacagtggaagaccctggaggcctcagccatctgccgctatgacctggcagagatccaggctgtctttgcaggaccctatatggaataccaggatggttcccggcgctggggtcgctatgagggtggggtgcctgagccccggcctggctcgtgtatcacagattcattgcgcagccaaggctacaattcatcccaagacttgccatccctggtcctggactttgtaaagttgcacccactgatggctcggcccgttgtgcccacacgtggacggcccctgctgctcaagcgcaacatacgctacacacaccttacagggacacctgtcaccacgcctgctggacctacctatgacctgctctttctgggcacagctgatggctggatccacaaggccgtagtcctgggctctgggatgcacattattgaagagacacaagtgttcagggagtcccagtctgtggaaaatctagtcatctctctattgcagcacagcctctatgtgggggctcctagcggagtcatccagctaccactctccagctgctcccgctaccgatcctgctatgactgcatcttggcccgagacccctactgtggctgggaccctggcacccatgcctgcgcagcagccaccaccatagccaacaggtcccagggaagcaggacagcactgatacaggacatagagagaggaaatcgaggctgtgagagcagcagggatacagggccaccaccaccactgaagacccgctctgtgctccggggtgatgatgtcctcctgccctgtgaccagccatccaacctggcccgggccttgtggctactcaatgggagcatgggcctgagcgatgggcagggtggctaccgtgtgggcgtggacgggctgctggttacagatgcacagcctgagcacagtggcaactatggctgctatgccgaggaaaatggcctccgcaccctgctggcctcctatagtctcacagtccggccagccactcctgccccagctccaaaagcccctgccacacctggggcacagctggcacctgatgtgagactgctctatgtgctagccattgccgcgcttggtggccyctgcctcatcctggcctcctccctcctctatgtggcctgtctgcgggaaggcagacgagggcgccgacggaaatactcactgggtcgggccagccgggcaggaggatctgcggtgcaactgcagacagtctcaggcagggctctgcaggtccatatgggctcaatgtcaccaccctctgcatggccctgtgtgctggatggtcctgaaaccagacaagtcctctgccagccacctaagccctgcgtacattcacatgcacacatggaagaatgtttatcggctgggctgcagtgcccccaccctcaccttctcctggtgcattcttgtttcatccctgcttctggacttggggtaccctcccaattgccacatcctatctggtcctcttccccagccccatgtggtgacctctttgtcaagagcttgggaacgggccagcctggggaggtaagactgcatcactcccctcctctcccttcctgtgtggcccttgtgaatcagcctccccactctccttggtcattctcaagagtatga

SEQ ID NO: 76 - protein, 870 aa, Homo sapiens
  VARIANT (1)...(870): Xaa = Any Amino Acid
MWGRLWPLLLSILTATAVPGPSLRRPSRELDATPRMTIPYEELSGTRHFKGQAQNYSTLLLEEASARLLVGARGALFSLSANDIGDGAHKEIHWEASPEMQSKCHQKGKNNQTECFNHVRFLQRLNSTHLYACGTHAFQPLCAAIDAEAFTLPTSFEEGKEKCPYDPARGFTGLIIDGGLYTATRYEFRSIPDIRRSRHPHSLRTEETPMHWLNDAEFVFSVLVRESKASAVGDDDKVYYFFTERATEEGSGSFTQSRSSHRVARVAXVCKGDLGGKKILQKKWTSFLKARLICHIPLYETLRGVCSLDAETSSRTHFYAAFTLSTQWKTLEASAICRYDLAEIQAVFAGPYMEYQDGSRRWGRYEGGVPEPRPGSCITDSLRSQGYNSSQDLPSLVLDFVKLHPLMARPVVPTRGRPLLLKRNIRYTHLTGTPVTTPAGPTYDLLFLGTADGWIHKAVVLGSGMHIIEETQVFRESQSVENLVISLLQHSLYVGAPSGVIQLPLSSCSRYRSCYDCILARDPYCGWDPGTHACAAATTIANRSQGSRTALIQDIERGNRGCESSRDTGPPPPLKTRSVLRGDDVLLPCDQPSNLARALWLLNGSMGLSDGQGGYRVGVDGLLVTDAQPEHSGNYGCYAEENGLRTLLASYSLTVRPATPAPAPKAPATPGAQLAPDVRLLYVLAIAALGGXCLILASSLLYVACLREGRRGRRRKYSLGRASRAGGSAVQLQTVSGRALQVHMGSMSPPSAWPCVLDGPETRQVLCQPPKPCVHSHAHMEECLSAGLQCPHPHLLLVHSCFIPASGLGVPSQLPHPIWSSSPAPCGDLFVKSLGTGQPGEVRLHHSPPLPSCVALVNQPPHSPWSFSRV

SEQ ID NO: 77 - DNA, 2598 bp, Homo sapiens
  CDS (1)...(2598)
atgtgggggaggctctggcccctcctcctcagcatcctcacagcaactgcagtcccaggaccctcactgcggagaccgtctagagaactagatgccacccctcggatgaccataccctatgaagagctctctgggacccggcacttcaagggccaagcccagaactactcaacactgctgctggaggaggcctcagcaaggctgctggtgggagcccgaggtgccctgttctctctcagtgccaacgacataggagatggggctcacaaagagatccactgggaagcctccccagagatgcaaagcaaatgtcatcaaaaagggaaaaacaaccagacggagtgctttaaccatgtgcggttcctgcagcggctcaattctacccacctctatgcatgtgggactcacgccttccagcccctctgtgcagccattgatgctgaggccttcaccttgccaaccagcttcgaggaggggaaggagaagtgtccttatgacccagcccgtggcttcacaggcctcatcattgatggaggcctctacacagccactaggtatgaattccggagcattcctgacatccgccggagccgccacccacactccctgagaactgaggagacaccaatgcattggctcaatgatgcggagtttgtgttctccgtcctcgtgcgggagagcaaggccagtgcagtgggtgatgatgacaaggtgtactacttcttcacggagcgtgccactgaggagggctctggcagcttcactcagagccgcagcagtcaccgtgtggcccgtgtggctcgygtctgcaagggagacctgggagggaagaagatcctgcagaagaagtggacttccttcctgaaagcccgtctcatctgccacattccactgtatgagacactgcgtggggtctgcagcctggatgctgaaacctcaagccgtacacacttctatgcagccttcacgctgagcacacagtggaagaccctggaggcctcagccatctgccgctatgacctggcagagatccaggctgtctttgcaggaccctatatggaataccaggatggttcccggcgctggggtcgctatgagggtggggtgcctgagccccggcctggctcgtgtatcacagattcattgcgcagccaaggctacaattcatcccaagacttgccatccctggtcctggactttgtaaagttgcacccactgatggctcggcccgttgtgcccacacgtggacggcccctgctgctcaagcgcaacatacgctacacacaccttacagggacacctgtcaccacgcctgctggacctacctatgacctgctctttctgggcacagctgatggctggatccacaaggccgtagtcctgggctctgggatgcacattattgaagagacacaagtgttcagggagtcccagtctgtggaaaatctagtcatctctctattgcagcacagcctctatgtgggggctcctagcggagtcatccagctaccactctccagctgctcccgctaccgatcctgctatgactgcatcttggcccgagacccctactgtggctgggaccctggcacccatgcctgcgcagcagccaccaccatagccaacaggacagcactgatacaggacatagagagaggaaatcgaggctgtgagagcagcagggatacagggccaccaccaccactgaagacccgctctgtgctccggggtgatgatgtcctcctgccctgtgaccagccatccaacctggcccgggccttgtggctactcaatgggagcatgggcctgagcgatgggcagggtggctaccgtgtgggcgtggacgggctgctggttacagatgcacagcctgagcacagtggcaactatggctgctatgccgaggaaaatggcctccgcaccctgctggcctcctatagtctcacagtccggccagccactcctgccccagctccaaaagcccctgccacacctggggcacagctggcacctgatgtgagactgctctatgtgctagccattgccgcgcttggtggccyctgcctcatcctggcctcctccctcctctatgtggcctgtctgcgggaaggcagacgagggcgccgacggaaatactcactgggtcgggccagccgggcaggaggatctgcggtgcaactgcagacagtctcaggcagggctctgcaggtccatatgggctcaatgtcaccaccctctgcatggccctgtgtgctggatggtcctgaaaccagacaagtcctctgccagccacctaagccctgcgtacattcacatgcacacatggaagaatgtttatcggctgggctgcagtgcccccaccctcaccttctcctggtgcattcttgtttcatccctgcttctggacttggggtaccctcccaattgccacatcctatctggtcctcttccccagccccatgtggtgacctctttgtcaagagcttgggaacgggccagcctggggaggtaagactgcatcactcccctcctctcccttcctgtgtggcccttgtgaatcagcctccccactctccttggtcattctcaagagtatga

SEQ ID NO: 78 - protein, 865 aa, Homo sapiens
  VARIANT (1)...(865): Xaa = Any Amino Acid
MWGRLWPLLLSILTATAVPGPSLRRPSRELDATPRMTIPYEELSGTRHFKGQAQNYSTLLLEEASARLLVGARGALFSLSANDIGDGAHKEIHWEASPEMQSKCHQKGKNNQTECFNHVRFLQRLNSTHLYACGTHAFQPLCAAIDAEAFTLPTSFEEGKEKCPYDPARGFTGLIIDGGLYTATRYEFRSIPDIRRSRHPHSLRTEETPMHWLNDAEFVFSVLVRESKASAVGDDDKVYYFFTERATEEGSGSFTQSRSSHRVARVAXVCKGDLGGKKILQKKWTSFLKARLICHIPLYETLRGVCSLDAETSSRTHFYAAFTLSTQWKTLEASAICRYDLAEIQAVFAGPYMEYQDGSRRWGRYEGGVPEPRPGSCITDSLRSQGYNSSQDLPSLVLDFVKLHPLMARPVVPTRGRPLLLKRNIRYTHLTGTPVTTPAGPTYDLLFLGTADGWIHKAVVLGSGMHIIEETQVFRESQSVENLVISLLQHSLYVGAPSGVIQLPLSSCSRYRSCYDCILARDPYCGWDPGTHACAAATTIANRTALIQDIERGNRGCESSRDTGPPPPLKTRSVLRGDDVLLPCDQPSNLARALWLLNGSMGLSDGQGGYRVGVDGLLVTDAQPEHSGNYGCYAEENGLRTLLASYSLTVRPATPAPAPKAPATPGAQLAPDVRLLYVLAIAALGGXCLILASSLLYVACLREGRRGRRRKYSLGRASRAGGSAVQLQTVSGRALQVHMGSMSPPSAWPCVLDGPETRQVLCQPPKPCVHSHAHMEECLSAGLQCPHPHLLLVHSCFIPASGLGVPSQLPHPIWSSSPAPCGDLFVKSLGTGQPGEVRLHHSPPLPSCVALVNQPPHSPWSFSRV

SEQ ID NO: 79 - DNA, 351 bp, Homo sapiens
  CDS (1)...(351)
atgcaaagcaaatgtcatcaaaaagggaaaaacaaccagacggagtgctttaaccatgtgcggttcctgcagcggctcaattctacccacctctatgcatgtgggactcacgccttccagcccctctgtgcagccattgatgctgaggccttcaccttgccaaccagcttcgaggaggggaaggagaagtgtccttatgacccagcccgtggcttcacaggcctcatcattgatggaggcctctacacagccactaggtatgaattccggagcattcctgacatccgccggagccgccacccacactccctgagaactgaggagacaccaatgcattggctcaatggttag

SEQ ID NO: 80 - protein, 116 aa, Homo sapiens
MQSKCHQKGKNNQTECFNHVRFLQRLNSTHLYACGTHAFQPLCAAIDAEAFTLPTSFEEGKEKCPYDPARGFTGLIIDGGLYTATRYEFRSIPDIRRSRHPHSLRTEETPMHWLNG

SEQ ID NO: 81 - DNA, 1194 bp, Homo sapiens
  CDS (1)...(1194)
atgcaaagcaaatgtcatcaaaaagggaaaaacaaccagacggagtgctttaaccatgtgcggttcctgcagcggctcaattctacccacctctatgcatgtgggactcacgccttccagcccctctgtgcagccattgatgctgaggccttcaccttgccaaccagcttcgaggaggggaaggagaagtgtccttatgacccagcccgtggcttcacaggcctcatcattgatggaggcctctacacagccactaggtatgaattccggagcattcctgacatccgccggagccgccacccacactccctgagaactgaggagacaccaatgcattggctcaatgatgcggagtttgtgttctccgtcctcgtgcgggagagcaaggccagtgcagtgggtgatgatgacaaggtgtactacttcttcacggagcgtgccactgaggagggctctggcagcttcactcagagccgcagcagtcaccgtgtggcccgtgtggctcgygtctgcaagggagacctgggagggaagaagatcctgcagaagaagtggacttccttcctgaaagcccgtctcatctgccacattccactgtatgagacactgcgtggggtctgcagcctggatgctgaaacctcaagccgtacacacttctatgcagccttcacgctgagcacacagtggaagaccctggaggcctcagccatctgccgctatgacctggcagagatccaggctgtctttgcaggaccctatatggaataccaggatggttcccggcgctggggtcgctatgagggtggggtgcctgagccccggcctggctcgtgtatcacagattcattgcgcagccaaggctacaattcatcccaagacttgccatccctggtcctggactttgtaaagttgcacccactgatggctcggcccgttgtgcccacacgtggacggcccctgctgctcaagcgcaacatacgctacacacaccttacagggacacctgtcaccacgcctgctggacctacctatgacctgctctttctgggcacagctgatggctggatccacaaggccgtagtcctgggctctgggatgcacattattgaagagacacaagtgttcagggagtcccagtctgtggaaaatctagtcatctctctattgcaggtagcccttctctgtgacccttaa

SEQ ID NO: 82 - protein, 397 aa, Homo sapiens
  VARIANT (1)...(397): Xaa = Any Amino Acid
MQSKCHQKGKNNQTECFNHVRFLQRLNSTHLYACGTHAFQPLCAAIDAEAFTLPTSFEEGKEKCPYDPARGFTGLIIDGGLYTATRYEFRSIPDIRRSRHPHSLRTEETPMHWLNDAEFVFSVLVRESKASAVGDDDKVYYFFTERATEEGSGSFTQSRSSHRVARVAXVCKGDLGGKKILQKKWTSFLKARLICHIPLYETLRGVCSLDAETSSRTHFYAAFTLSTQWKTLEASAICRYDLAEIQAVFAGPYMEYQDGSRRWGRYEGGVPEPRPGSCITDSLRSQGYNSSQDLPSLVLDFVKLHPLMARPVVPTRGRPLLLKRNIRYTHLTGTPVTTPAGPTYDLLFLGTADGWIHKAVVLGSGMHIIEETQVFRESQSVENLVISLLQVALLCDP

SEQ ID NO: 83 - DNA, 1812 bp, Homo sapiens
  CDS (1)...(1812)
atgcaaagcaaatgtcatcaaaaagggaaaaacaaccagacggagtgctttaaccatgtgcggttcctgcagcggctcaattctacccacctctatgcatgtgggactcacgccttccagcccctctgtgcagccattgatgctgaggccttcaccttgccaaccagcttcgaggaggggaaggagaagtgtccttatgacccagcccgtggcttcacaggcctcatcattgatggaggcctctacacagccactaggtatgaattccggagcattcctgacatccgccggagccgccacccacactccctgagaactgaggagacaccaatgcattggctcaatgatgcggagtttgtgttctccgtcctcgtgcgggagagcaaggccagtgcagtgggtgatgatgacaaggtgtactacttcttcacggagcgtgccactgaggagggctctggcagcttcactcagagccgcagcagtcaccgtgtggcccgtgtggctcgygtctgcaagggagacctgggagggaagaagatcctgcagaagaagtggacttccttcctgaaagcccgtctcatctgccacattccactgtatgagacactgcgtggggtctgcagcctggatgctgaaacctcaagccgtacacacttctatgcagccttcacgctgagcacacagtggaagaccctggaggcctcagccatctgccgctatgacctggcagagatccaggctgtctttgcaggaccctatatggaataccaggatggttcccggcgctggggtcgctatgagggtggggtgcctgagccccggcctggctcgtgtatcacagattcattgcgcagccaaggctacaattcatcccaagacttgccatccctggtcctggactttgtaaagttgcacccactgatggctcggcccgttgtgcccacacgtggacggcccctgctgctcaagcgcaacatacgctacacacaccttacagggacacctgtcaccacgcctgctggacctacctatgacctgctctttctgggcacagctgatggctggatccacaaggccgtagtcctgggctctgggatgcacattattgaagagacacaagtgttcagggagtcccagtctgtggaaaatctagtcatctctctattgcagcacagcctctatgtgggggctcctagcggagtcatccagctaccactctccagctgctcccgctaccgatcctgctatgactgcatcttggcccgagacccctactgtggctgggaccctggcacccatgcctgcgcagcagccaccaccatagccaacaggtcccagggaagcaggacagcactgatacaggacatagagagaggaaatcgaggctgtgagagcagcagggatacaggcagggctctgcaggtccatatgggctcaatgtcaccaccctctgcatggccctgtgtgctggatggtcctgaaaccagacaagtcctctgccagccacctaagccctgcgtacattcacatgcacacatggaagaatgtttatcggctgggctgcagtgcccccaccctcaccttctcctggtgcattcttgtttcatccctgcttctggacttggggtaccctcccaattgccacatcctatctggtcctcttccccagccccatgtggtgacctctttgtcaagagcttgggaacgggccagcctggggaggtaagactgcatcactcccctcctctcccttcctgtgtggcccttgtgaatcagcctccccactctccttggtcattctcaagagtatga

SEQ ID NO: 84 - protein, 603 aa, Homo sapiens
  VARIANT (1)...(603): Xaa = Any Amino Acid
MQSKCHQKGKNNQTECFNHVRFLQRLNSTHLYACGTHAFQPLCAAIDAEAFTLPTSFEEGKEKCPYDPARGFTGLIIDGGLYTATRYEFRSIPDIRRSRHPHSLRTEETPMHWLNDAEFVFSVLVRESKASAVGDDDKVYYFFTERATEEGSGSFTQSRSSHRVARVAXVCKGDLGGKKILQKKWTSFLKARLICHIPLYETLRGVCSLDAETSSRTHFYAAFTLSTQWKTLEASAICRYDLAEIQAVFAGPYMEYQDGSRRWGRYEGGVPEPRPGSCITDSLRSQGYNSSQDLPSLVLDFVKLHPLMARPVVPTRGRPLLLKRNIRYTHLTGTPVTTPAGPTYDLLFLGTADGWIHKAVVLGSGMHIIEETQVFRESQSVENLVISLLQHSLYVGAPSGVIQLPLSSCSRYRSCYDCILARDPYCGWDPGTHACAAATTIANRSQGSRTALIQDIERGNRGCESSRDTGRALQVHMGSMSPPSAWPCVLDGPETRQVLCQPPKPCVHSHAHMEECLSAGLQCPHPHLLLVHSCFIPASGLGVPSQLPHPIWSSSPAPCGDLFVKSLGTGQPGEVRLHHSPPLPSCVALVNQPPHSPWSFSRV

SEQ ID NO: 85 - DNA, 1797 bp, Homo sapiens
  CDS (1)...(1797)
atgcaaagcaaatgtcatcaaaaagggaaaaacaaccagacggagtgctttaaccatgtgcggttcctgcagcggctcaattctacccacctctatgcatgtgggactcacgccttccagcccctctgtgcagccattgatgctgaggccttcaccttgccaaccagcttcgaggaggggaaggagaagtgtccttatgacccagcccgtggcttcacaggcctcatcattgatggaggcctctacacagccactaggtatgaattccggagcattcctgacatccgccggagccgccacccacactccctgagaactgaggagacaccaatgcattggctcaatgatgcggagtttgtgttctccgtcctcgtgcgggagagcaaggccagtgcagtgggtgatgatgacaaggtgtactacttcttcacggagcgtgccactgaggagggctctggcagcttcactcagagccgcagcagtcaccgtgtggcccgtgtggctcgygtctgcaagggagacctgggagggaagaagatcctgcagaagaagtggacttccttcctgaaagcccgtctcatctgccacattccactgtatgagacactgcgtggggtctgcagcctggatgctgaaacctcaagccgtacacacttctatgcagccttcacgctgagcacacagtggaagaccctggaggcctcagccatctgccgctatgacctggcagagatccaggctgtctttgcaggaccctatatggaataccaggatggttcccggcgctggggtcgctatgagggtggggtgcctgagccccggcctggctcgtgtatcacagattcattgcgcagccaaggctacaattcatcccaagacttgccatccctggtcctggactttgtaaagttgcacccactgatggctcggcccgttgtgcccacacgtggacggcccctgctgctcaagcgcaacatacgctacacacaccttacagggacacctgtcaccacgcctgctggacctacctatgacctgctctttctgggcacagctgatggctggatccacaaggccgtagtcctgggctctgggatgcacattattgaagagacacaagtgttcagggagtcccagtctgtggaaaatctagtcatctctctattgcagcacagcctctatgtgggggctcctagcggagtcatccagctaccactctccagctgctcccgctaccgatcctgctatgactgcatcttggcccgagacccctactgtggctgggaccctggcacccatgcctgcgcagcagccaccaccatagccaacaggacagcactgatacaggacatagagagaggaaatcgaggctgtgagagcagcagggatacaggcagggctctgcaggtccatatgggctcaatgtcaccaccctctgcatggccctgtgtgctggatggtcctgaaaccagacaagtcctctgccagccacctaagccctgcgtacattcacatgcacacatggaagaatgtttatcggctgggctgcagtgcccccaccctcaccttctcctggtgcattcttgtttcatccctgcttctggacttggggtaccctcccaattgccacatcctatctggtcctcttccccagccccatgtggtgacctctttgtcaagagcttgggaacgggccagcctggggaggtaagactgcatcactcccctcctctcccttcctgtgtggcccttgtgaatcagcctccccactctccttggtcattctcaagagtatga

SEQ ID NO: 86 - protein, 598 aa, Homo sapiens
  VARIANT (1)...(598): Xaa = Any Amino Acid
MQSKCHQKGKNNQTECFNHVRFLQRLNSTHLYACGTHAFQPLCAAIDAEAFTLPTSFEEGKEKCPYDPARGFTGLIIDGGLYTATRYEFRSIPDIRRSRHPHSLRTEETPMHWLNDAEFVFSVLVRESKASAVGDDDKVYYFFTERATEEGSGSFTQSRSSHRVARVAXVCKGDLGGKKILQKKWTSFLKARLICHIPLYETLRGVCSLDAETSSRTHFYAAFTLSTQWKTLEASAICRYDLAEIQAVFAGPYMEYQDGSRRWGRYEGGVPEPRPGSCITDSLRSQGYNSSQDLPSLVLDFVKLHPLMARPVVPTRGRPLLLKRNIRYTHLTGTPVTTPAGPTYDLLFLGTADGWIHKAVVLGSGMHIIEETQVFRESQSVENLVISLLQHSLYVGAPSGVIQLPLSSCSRYRSCYDCILARDPYCGWDPGTHACAAATTIANRTALIQDIERGNRGCESSRDTGRALQVHMGSMSPPSAWPCVLDGPETRQVLCQPPKPCVHSHAHMEECLSAGLQCPHPHLLLVHSCFIPASGLGVPSQLPHPIWSSSPAPCGDLFVKSLGTGQPGEVRLHHSPPLPSCVALVNQPPHSPWSFSRV

SEQ ID NO: 87 - DNA, 2235 bp, Homo sapiens
  CDS (1)...(2235)
atgcaaagcaaatgtcatcaaaaagggaaaaacaaccagacggagtgctttaaccatgtgcggttcctgcagcggctcaattctacccacctctatgcatgtgggactcacgccttccagcccctctgtgcagccattgatgctgaggccttcaccttgccaaccagcttcgaggaggggaaggagaagtgtccttatgacccagcccgtggcttcacaggcctcatcattgatggaggcctctacacagccactaggtatgaattccggagcattcctgacatccgccggagccgccacccacactccctgagaactgaggagacaccaatgcattggctcaatgatgcggagtttgtgttctccgtcctcgtgcgggagagcaaggccagtgcagtgggtgatgatgacaaggtgtactacttcttcacggagcgtgccactgaggagggctctggcagcttcactcagagccgcagcagtcaccgtgtggcccgtgtggctcgygtctgcaagggagacctgggagggaagaagatcctgcagaagaagtggacttccttcctgaaagcccgtctcatctgccacattccactgtatgagacactgcgtggggtctgcagcctggatgctgaaacctcaagccgtacacacttctatgcagccttcacgctgagcacacagtggaagaccctggaggcctcagccatctgccgctatgacctggcagagatccaggctgtctttgcaggaccctatatggaataccaggatggttcccggcgctggggtcgctatgagggtggggtgcctgagccccggcctggctcgtgtatcacagattcattgcgcagccaaggctacaattcatcccaagacttgccatccctggtcctggactttgtaaagttgcacccactgatggctcggcccgttgtgcccacacgtggacggcccctgctgctcaagcgcaacatacgctacacacaccttacagggacacctgtcaccacgcctgctggacctacctatgacctgctctttctgggcacagctgatggctggatccacaaggccgtagtcctgggctctgggatgcacattattgaagagacacaagtgttcagggagtcccagtctgtggaaaatctagtcatctctctattgcagcacagcctctatgtgggggctcctagcggagtcatccagctaccactctccagctgctcccgctaccgatcctgctatgactgcatcttggcccgagacccctactgtggctgggaccctggcacccatgcctgcgcagcagccaccaccatagccaacaggtcccagggaagcaggacagcactgatacaggacatagagagaggaaatcgaggctgtgagagcagcagggatacagggccaccaccaccactgaagacccgctctgtgctccggggtgatgatgtcctcctgccctgtgaccagccatccaacctggcccgggccttgtggctactcaatgggagcatgggcctgagcgatgggcagggtggctaccgtgtgggcgtggacgggctgctggttacagatgcacagcctgagcacagtggcaactatggctgctatgccgaggaaaatggcctccgcaccctgctggcctcctatagtctcacagtccggccagccactcctgccccagctccaaaagcccctgccacacctggggcacagctggcacctgatgtgagactgctctatgtgctagccattgccgcgcttggtggccyctgcctcatcctggcctcctccctcctctatgtggcctgtctgcgggaaggcagacgagggcgccgacggaaatactcactgggtcgggccagccgggcaggaggatctgcggtgcaactgcagacagtctcaggccagtgtcctggagaggaagatgagggtgatgatgagggggctgggggcctggagggcagctgtctccagatcatccctggggagggagccccagccccaccacccccaccgcccccaccgccaccggctgagctgaccaatggcttggtggcactgcccagccggctgcggaggatgaatggcaatagctatgtgcttctgaggcagagcaacaatggagtaccagcagggccctgctccttcgccgaggaactcagccgcatcctggaaaaaaggaagcacacgcagctcgtggagcagctagatgagagctctgtctga

SEQ ID NO: 88 - protein, 744 aa, Homo sapiens
  VARIANT (1)...(744): Xaa = Any Amino Acid
MQSKCHQKGKNNQTECFNHVRFLQRLNSTHLYACGTHAFQPLCAAIDAEAFTLPTSFEEGKEKCPYDPARGFTGLIIDGGLYTATRYEFRSIPDIRRSRHPHSLRTEETPMHWLNDAEFVFSVLVRESKASAVGDDDKVYYFFTERATEEGSGSFTQSRSSHRVARVAXVCKGDLGGKKILQKKWTSFLKARLICHIPLYETLRGVCSLDAETSSRTHFYAAFTLSTQWKTLEASAICRYDLAEIQAVFAGPYMEYQDGSRRWGRYEGGVPEPRPGSCITDSLRSQGYNSSQDLPSLVLDFVKLHPLMARPVVPTRGRPLLLKRNIRYTHLTGTPVTTPAGPTYDLLFLGTADGWIHKAVVLGSGMHIIEETQVFRESQSVENLVISLLQHSLYVGAPSGVIQLPLSSCSRYRSCYDCILARDPYCGWDPGTHACAAATTIANRSQGSRTALIQDIERGNRGCESSRDTGPPPPLKTRSVLRGDDVLLPCDQPSNLARALWLLNGSMGLSDGQGGYRVGVDGLLVTDAQPEHSGNYGCYAEENGLRTLLASYSLTVRPATPAPAPKAPATPGAQLAPDVRLLYVLAIAALGGXCLILASSLLYVACLREGRRGRRRKYSLGRASRAGGSAVQLQTVSGQCPGEEDEGDDEGAGGLEGSCLQIIPGEGAPAPPPPPPPPPPAELTNGLVALPSRLRRMNGNSYVLLRQSNNGVPAGPCSFAEELSRILEKRKHTQLVEQLDESSV

SEQ ID NO: 89 - DNA, 2220 bp, Homo sapiens
  CDS (1)...(2220)
atgcaaagcaaatgtcatcaaaaagggaaaaacaaccagacggagtgctttaaccatgtgcggttcctgcagcggctcaattctacccacctctatgcatgtgggactcacgccttccagcccctctgtgcagccattgatgctgaggccttcaccttgccaaccagcttcgaggaggggaaggagaagtgtccttatgacccagcccgtggcttcacaggcctcatcattgatggaggcctctacacagccactaggtatgaattccggagcattcctgacatccgccggagccgccacccacactccctgagaactgaggagacaccaatgcattggctcaatgatgcggagtttgtgttctccgtcctcgtgcgggagagcaaggccagtgcagtgggtgatgatgacaaggtgtactacttcttcacggagcgtgccactgaggagggctctggcagcttcactcagagccgcagcagtcaccgtgtggcccgtgtggctcgygtctgcaagggagacctgggagggaagaagatcctgcagaagaagtggacttccttcctgaaagcccgtctcatctgccacattccactgtatgagacactgcgtggggtctgcagcctggatgctgaaacctcaagccgtacacacttctatgcagccttcacgctgagcacacagtggaagaccctggaggcctcagccatctgccgctatgacctggcagagatccaggctgtctttgcaggaccctatatggaataccaggatggttcccggcgctggggtcgctatgagggtggggtgcctgagccccggcctggctcgtgtatcacagattcattgcgcagccaaggctacaattcatcccaagacttgccatccctggtcctggactttgtaaagttgcacccactgatggctcggcccgttgtgcccacacgtggacggcccctgctgctcaagcgcaacatacgctacacacaccttacagggacacctgtcaccacgcctgctggacctacctatgacctgctctttctgggcacagctgatggctggatccacaaggccgtagtcctgggctctgggatgcacattattgaagagacacaagtgttcagggagtcccagtctgtggaaaatctagtcatctctctattgcagcacagcctctatgtgggggctcctagcggagtcatccagctaccactctccagctgctcccgctaccgatcctgctatgactgcatcttggcccgagacccctactgtggctgggaccctggcacccatgcctgcgcagcagccaccaccatagccaacaggacagcactgatacaggacatagagagaggaaatcgaggctgtgagagcagcagggatacagggccaccaccaccactgaagacccgctctgtgctccggggtgatgatgtcctcctgccctgtgaccagccatccaacctggcccgggccttgtggctactcaatgggagcatgggcctgagcgatgggcagggtggctaccgtgtgggcgtggacgggctgctggttacagatgcacagcctgagcacagtggcaactatggctgctatgccgaggaaaatggcctccgcaccctgctggcctcctatagtctcacagtccggccagccactcctgccccagctccaaaagcccctgccacacctggggcacagctggcacctgatgtgagactgctctatgtgctagccattgccgcgcttggtggccyctgcctcatcctggcctcctccctcctctatgtggcctgtctgcgggaaggcagacgagggcgccgacggaaatactcactgggtcgggccagccgggcaggaggatctgcggtgcaactgcagacagtctcaggccagtgtcctggagaggaagatgagggtgatgatgagggggctgggggcctggagggcagctgtctccagatcatccctggggagggagccccagccccaccacccccaccgcccccaccgccaccggctgagctgaccaatggcttggtggcactgcccagccggctgcggaggatgaatggcaatagctatgtgcttctgaggcagagcaacaatggagtaccagcagggccctgctccttcgccgaggaactcagccgcatcctggaaaaaaggaagcacacgcagctcgtggagcagctagatgagagctctgtctga

SEQ ID NO: 90 - protein, 739 aa, Homo sapiens
  VARIANT (1)...(739): Xaa = Any Amino Acid
MQSKCHQKGKNNQTECFNHVRFLQRLNSTHLYACGTHAFQPLCAAIDAEAFTLPTSFEEGKEKCPYDPARGFTGLIIDGGLYTATRYEFRSIPDIRRSRHPHSLRTEETPMHWLNDAEFVFSVLVRESKASAVGDDDKVYYFFTERATEEGSGSFTQSRSSHRVARVAXVCKGDLGGKKILQKKWTSFLKARLICHIPLYETLRGVCSLDAETSSRTHFYAAFTLSTQWKTLEASAICRYDLAEIQAVFAGPYMEYQDGSRRWGRYEGGVPEPRPGSCITDSLRSQGYNSSQDLPSLVLDFVKLHPLMARPVVPTRGRPLLLKRNIRYTHLTGTPVTTPAGPTYDLLFLGTADGWIHKAVVLGSGMHIIEETQVFRESQSVENLVISLLQHSLYVGAPSGVIQLPLSSCSRYRSCYDCILARDPYCGWDPGTHACAAATTIANRTALIQDIERGNRGCESSRDTGPPPPLKTRSVLRGDDVLLPCDQPSNLARALWLLNGSMGLSDGQGGYRVGVDGLLVTDAQPEHSGNYGCYAEENGLRTLLASYSLTVRPATPAPAPKAPATPGAQLAPDVRLLYVLAIAALGGXCLILASSLLYVACLREGRRGRRRKYSLGRASRAGGSAVQLQTVSGQCPGEEDEGDDEGAGGLEGSCLQIIPGEGAPAPPPPPPPPPPAELTNGLVALPSRLRRMNGNSYVLLRQSNNGVPAGPCSFAEELSRILEKRKHTQLVEQLDESSV

SEQ ID NO: 91 - DNA, 2316 bp, Homo sapiens
  CDS (1)...(2316)
atgcaaagcaaatgtcatcaaaaagggaaaaacaaccagacggagtgctttaaccatgtgcggttcctgcagcggctcaattctacccacctctatgcatgtgggactcacgccttccagcccctctgtgcagccattgatgctgaggccttcaccttgccaaccagcttcgaggaggggaaggagaagtgtccttatgacccagcccgtggcttcacaggcctcatcattgatggaggcctctacacagccactaggtatgaattccggagcattcctgacatccgccggagccgccacccacactccctgagaactgaggagacaccaatgcattggctcaatgatgcggagtttgtgttctccgtcctcgtgcgggagagcaaggccagtgcagtgggtgatgatgacaaggtgtactacttcttcacggagcgtgccactgaggagggctctggcagcttcactcagagccgcagcagtcaccgtgtggcccgtgtggctcgygtctgcaagggagacctgggagggaagaagatcctgcagaagaagtggacttccttcctgaaagcccgtctcatctgccacattccactgtatgagacactgcgtggggtctgcagcctggatgctgaaacctcaagccgtacacacttctatgcagccttcacgctgagcacacagtggaagaccctggaggcctcagccatctgccgctatgacctggcagagatccaggctgtctttgcaggaccctatatggaataccaggatggttcccggcgctggggtcgctatgagggtggggtgcctgagccccggcctggctcgtgtatcacagattcattgcgcagccaaggctacaattcatcccaagacttgccatccctggtcctggactttgtaaagttgcacccactgatggctcggcccgttgtgcccacacgtggacggcccctgctgctcaagcgcaacatacgctacacacaccttacagggacacctgtcaccacgcctgctggacctacctatgacctgctctttctgggcacagctgatggctggatccacaaggccgtagtcctgggctctgggatgcacattattgaagagacacaagtgttcagggagtcccagtctgtggaaaatctagtcatctctctattgcagcacagcctctatgtgggggctcctagcggagtcatccagctaccactctccagctgctcccgctaccgatcctgctatgactgcatcttggcccgagacccctactgtggctgggaccctggcacccatgcctgcgcagcagccaccaccatagccaacaggtcccagggaagcaggacagcactgatacaggacatagagagaggaaatcgaggctgtgagagcagcagggatacagggccaccaccaccactgaagacccgctctgtgctccggggtgatgatgtcctcctgccctgtgaccagccatccaacctggcccgggccttgtggctactcaatgggagcatgggcctgagcgatgggcagggtggctaccgtgtgggcgtggacgggctgctggttacagatgcacagcctgagcacagtggcaactatggctgctatgccgaggaaaatggcctccgcaccctgctggcctcctatagtctcacagtccggccagccactcctgccccagctccaaaagcccctgccacacctggggcacagctggcacctgatgtgagactgctctatgtgctagccattgccgcgcttggtggccyctgcctcatcctggcctcctccctcctctatgtggcctgtctgcgggaaggcagacgagggcgccgacggaaatactcactgggtcgggccagccgggcaggaggatctgcggtgcaactgcagacagtctcaggcagggctctgcaggtccatatgggctcaatgtcaccaccctctgcatggccctgtgtgctggatggtcctgaaaccagacaagtcctctgccagccacctaagccctgcgtacattcacatgcacacatggaagaatgtttatcggctgggctgcagtgcccccaccctcaccttctcctggtgcattcttgtttcatccctgcttctggacttggggtaccctcccaattgccacatcctatctggtcctcttccccagccccatgtggtgacctctttgtcaagagcttgggaacgggccagcctggggaggtaagactgcatcactcccctcctctcccttcctgtgtggcccttgtgaatcagcctccccactctccttggtcattctcaagagtatga

SEQ ID NO: 92 - protein, 771 aa, Homo sapiens
  VARIANT (1)...(771): Xaa = Any Amino Acid
MQSKCHQKGKNNQTECFNHVRFLQRLNSTHLYACGTHAFQPLCAAIDAEAFTLPTSFEEGKEKCPYDPARGFTGLIIDGGLYTATRYEFRSIPDIRRSRHPHSLRTEETPMHWLNDAEFVFSVLVRESKASAVGDDDKVYYFFTERATEEGSGSFTQSRSSHRVARVAXVCKGDLGGKKILQKKWTSFLKARLICHIPLYETLRGVCSLDAETSSRTHFYAAFTLSTQWKTLEASAICRYDLAEIQAVFAGPYMEYQDGSRRWGRYEGGVPEPRPGSCITDSLRSQGYNSSQDLPSLVLDFVKLHPLMARPVVPTRGRPLLLKRNIRYTHLTGTPVTTPAGPTYDLLFLGTADGWIHKAVVLGSGMHIIEETQVFRESQSVENLVISLLQHSLYVGAPSGVIQLPLSSCSRYRSCYDCILARDPYCGWDPGTHACAAATTIANRSQGSRTALIQDIERGNRGCESSRDTGPPPPLKTRSVLRGDDVLLPCDQPSNLARALWLLNGSMGLSDGQGGYRVGVDGLLVTDAQPEHSGNYGCYAEENGLRTLLASYSLTVRPATPAPAPKAPATPGAQLAPDVRLLYVLAIAALGGXCLILASSLLYVACLREGRRGRRRKYSLGRASRAGGSAVQLQTVSGRALQVHMGSMSPPSAWPCVLDGPETRQVLCQPPKPCVHSHAHMEECLSAGLQCPHPHLLLVHSCFIPASGLGVPSQLPHPIWSSSPAPCGDLFVKSLGTGQPGEVRLHHSPPLPSCVALVNQPPHSPWSFSRV

SEQ ID NO: 93 - DNA, 2301 bp, Homo sapiens
  CDS (1)...(2301)
atgcaaagcaaatgtcatcaaaaagggaaaaacaaccagacggagtgctttaaccatgtgcggttcctgcagcggctcaattctacccacctctatgcatgtgggactcacgccttccagcccctctgtgcagccattgatgctgaggccttcaccttgccaaccagcttcgaggaggggaaggagaagtgtccttatgacccagcccgtggcttcacaggcctcatcattgatggaggcctctacacagccactaggtatgaattccggagcattcctgacatccgccggagccgccacccacactccctgagaactgaggagacaccaatgcattggctcaatgatgcggagtttgtgttctccgtcctcgtgcgggagagcaaggccagtgcagtgggtgatgatgacaaggtgtactacttcttcacggagcgtgccactgaggagggctctggcagcttcactcagagccgcagcagtcaccgtgtggcccgtgtggctcgygtctgcaagggagacctgggagggaagaagatcctgcagaagaagtggacttccttcctgaaagcccgtctcatctgccacattccactgtatgagacactgcgtggggtctgcagcctggatgctgaaacctcaagccgtacacacttctatgcagccttcacgctgagcacacagtggaagaccctggaggcctcagccatctgccgctatgacctggcagagatccaggctgtctttgcaggaccctatatggaataccaggatggttcccggcgctggggtcgctatgagggtggggtgcctgagccccggcctggctcgtgtatcacagattcattgcgcagccaaggctacaattcatcccaagacttgccatccctggtcctggactttgtaaagttgcacccactgatggctcggcccgttgtgcccacacgtggacggcccctgctgctcaagcgcaacatacgctacacacaccttacagggacacctgtcaccacgcctgctggacctacctatgacctgctctttctgggcacagctgatggctggatccacaaggccgtagtcctgggctctgggatgcacattattgaagagacacaagtgttcagggagtcccagtctgtggaaaatctagtcatctctctattgcagcacagcctctatgtgggggctcctagcggagtcatccagctaccactctccagctgctcccgctaccgatcctgctatgactgcatcttggcccgagacccctactgtggctgggaccctggcacccatgcctgcgcagcagccaccaccatagccaacaggacagcactgatacaggacatagagagaggaaatcgaggctgtgagagcagcagggatacagggccaccaccaccactgaagacccgctctgtgctccggggtgatgatgtcctcctgccctgtgaccagccatccaacctggcccgggccttgtggctactcaatgggagcatgggcctgagcgatgggcagggtggctaccgtgtgggcgtggacgggctgctggttacagatgcacagcctgagcacagtggcaactatggctgctatgccgaggaaaatggcctccgcaccctgctggcctcctatagtctcacagtccggccagccactcctgccccagctccaaaagcccctgccacacctggggcacagctggcacctgatgtgagactgctctatgtgctagccattgccgcgcttggtggccyctgcctcatcctggcctcctccctcctctatgtggcctgtctgcgggaaggcagacgagggcgccgacggaaatactcactgggtcgggccagccgggcaggaggatctgcggtgcaactgcagacagtctcaggcagggctctgcaggtccatatgggctcaatgtcaccaccctctgcatggccctgtgtgctggatggtcctgaaaccagacaagtcctctgccagccacctaagccctgcgtacattcacatgcacacatggaagaatgtttatcggctgggctgcagtgcccccaccctcaccttctcctggtgcattcttgtttcatccctgcttctggacttggggtaccctcccaattgccacatcctatctggtcctcttccccagccccatgtggtgacctctttgtcaagagcttgggaacgggccagcctggggaggtaagactgcatcactcccctcctctcccttcctgtgtggcccttgtgaatcagcctccccactctccttggtcattctcaagagtatga

SEQ ID NO: 94 - protein, 766 aa, Homo sapiens
  VARIANT (1)...(766): Xaa = Any Amino Acid
MQSKCHQKGKNNQTECFNHVRFLQRLNSTHLYACGTHAFQPLCAAIDAEAFTLPTSFEEGKEKCPYDPARGFTGLIIDGGLYTATRYEFRSIPDIRRSRHPHSLRTEETPMHWLNDAEFVFSVLVRESKASAVGDDDKVYYFFTERATEEGSGSFTQSRSSHRVARVAXVCKGDLGGKKILQKKWTSFLKARLICHIPLYETLRGVCSLDAETSSRTHFYAAFTLSTQWKTLEASAICRYDLAEIQAVFAGPYMEYQDGSRRWGRYEGGVPEPRPGSCITDSLRSQGYNSSQDLPSLVLDFVKLHPLMARPVVPTRGRPLLLKRNIRYTHLTGTPVTTPAGPTYDLLFLGTADGWIHKAVVLGSGMHIIEETQVFRESQSVENLVISLLQHSLYVGAPSGVIQLPLSSCSRYRSCYDCILARDPYCGWDPGTHACAAATTIANRTALIQDIERGNRGCESSRDTGPPPPLKTRSVLRGDDVLLPCDQPSNLARALWLLNGSMGLSDGQGGYRVGVDGLLVTDAQPEHSGNYGCYAEENGLRTLLASYSLTVRPATPAPAPKAPATPGAQLAPDVRLLYVLAIAALGGXCLILASSLLYVACLREGRRGRRRKYSLGRASRAGGSAVQLQTVSGRALQVHMGSMSPPSAWPCVLDGPETRQVLCQPPKPCVHSHAHMEECLSAGLQCPHPHLLLVHSCFIPASGLGVPSQLPHPIWSSSPAPCGDLFVKSLGTGQPGEVRLHHSPPLPSCVALVNQPPHSPWSFSRV

SEQ ID NO: 95 - DNA, 2951 bp, Homo sapiens
ccgcggagccgcgcgtcgctgtctctatggccccggatccgagcgcaaagaaaacggacctcagaaaaccaggactagctctactgtcgggggcagggtgaccccatcagtaacctacaacccctctagaacttcacaactccctctcaccatggagtttgcatttgatgcagaaaggcatgtgatccctccctccttctgacctcttagctggggattccatggccacacaaccctgtgactccatgtccccccgattccaggaccccccatggccccatgattccttgactcctatgaccttatgacccctgaccttccaagtgacttccttggactttgacccctgtgactgtgcttcccattccccgcccccacaacctgtgactctggctccctttgggggtcttgttagtctgggcctccccaggaagatgtgggggaggctctggcccctcctcctcagcatcctcacagcaactgcagtcccaggaccctcactgcggagaccgtctagagaactagatgccacccctcggatgaccataccctatgaagagctctctgggacccggcacttcaagggccaagcccagaactactcaacactgctgctggaggaggcctcagcaaggctgctggtgggagcccgaggtgccctgttctctctcagtgccaacgacataggagatggggctcacaaagagatccactgggaagcctccccagagatgcaaagcaaatgtcatcaaaaagggaaaaacaaccagacggagtgctttaaccatgtgcggttcctgcagcggctcaattctacccacctctatgcatgtgggactcacgccttccagcccctctgtgcagccattgatgctgaggccttcaccttgccaaccagcttcgaggaggggaaggagaagtgtccttatgacccagcccgtggcttcacaggcctcatcattgatggaggcctctacacagccactaggtatgaattccggagcattcctgacatccgccggagccgccacccacactccctgagaactgaggagacaccaatgcattggctcaatgatgcggagtttgtgttctccgtcctcgtgcgggagagcaaggccagtgcagtgggtgatgatgacaaggtgtactacttcttcacggagcgtgccactgaggagggctctggcagcttcactcagagccgcagcagtcaccgtgtggcccgtgtggctcgygtctgcaagggagacctgggagggaagaagatcctgcagaagaagtggacttccttcctgaaagcccgtctcatctgccacattccactgtatgagacactgcgtggggtctgcagcctggatgctgaaacctcaagccgtacacacttctatgcagccttcacgctgagcacacagtggaagaccctggaggcctcagccatctgccgctatgacctggcagagatccaggctgtctttgcaggaccctatatggaataccaggatggttcccggcgctggggtcgctatgagggtggggtgcctgagccccggcctggctcgtgtatcacagattcattgcgcagccaaggctacaattcatcccaagacttgccatccctggtcctggactttgtaaagttgcacccactgatggctcggcccgttgtgcccacacgtggacggcccctgctgctcaagcgcaacatacgctacacacaccttacagggacacctgtcaccacgcctgctggacctacctatgacctgctctttctgggcacagctgatggctggatccacaaggccgtagtcctgggctctgggatgcacattattgaagagacacaagtgttcagggagtcccagtctgtggaaaatctagtcatctctctattgcagcacagcctctatgtgggggctcctagcggagtcatccagctaccactctccagctgctcccgctaccgatcctgctatgactgcatcttggcccgagacccctactgtggctgggaccctggcacccatgcctgcgcagcagccaccaccatagccaacaggacagcactgatacaggacatagagagaggaaatcgaggctgtgagagcagcagggatacagggccaccaccaccactgaagacccgctctgtgctccggggtgatgatgtcctcctgccctgtgaccagccatccaacctggcccgggccttgtggctactcaatgggagcatgggcctgagcgatgggcagggtggctaccgtgtgggcgtggacgggctgctggttacagatgcacagcctgagcacagtggcaactatggctgctatgccgaggaaaatggcctccgcaccctgctggcctcctatagtctcacagtccggccagccactcctgccccagctccaaaagcccctgccacacctggggcacagctggcacctgatgtgagactgctctatgtgctagccattgccgcgcttggtggccyctgcctcatcctggcctcctccctcctctatgtggcctgtctgcgggaaggcagacgagggcgccgacggaaatactcactgggtcgggccagccgggcaggaggatctgcggtgcaactgcagacagtctcaggccagtgtcctggagaggaagatgagggtgatgatgagggggctgggggcctggagggcagctgtctccagatcatccctggggagggagccccagccccaccacccccaccgcccccaccgccaccggctgagctgaccaatggcttggtggcactgcccagccggctgcggaggatgaatggcaatagctatgtgcttctgaggcagagcaacaatggagtaccagcagggccctgctccttcgccgaggaactcagccgcatcctggaaaaaaggaagcacacgcagctcgtggagcagctagatgagagctctgtctga

SEQ ID NO: 96 - DNA, 3222 bp, Homo sapiens
  CDS (1)...(3222)
atgagggtcttcctgctttgtgcctacatactgctgctgatggtttcccagttgagggcagtcagctttcctgaagatgatgaaccccttaatactgtcgactatcactattcaaggcaatatccggtttttagaggacgcccttcaggcaatgaatcgcagcacaggctggactttcagctgatgttgaaaattcgagacacactttatattgctggcagggatcaagtttatacagtaaacttaaatgaaatgcccaaaacagaagtaatacccaacaagaaactgacatggcgatcaagacaacaggatcgagaaaactgtgctatgaaaggcaagcataaagatgaatgccacaactttatcaaagtatttgttccaagaaacgatgagatggtttttgtttgtggtaccaatgcattcaatcccatgtgtagatactacaggttgagtaccttagaatatgatggggaagaaattagtggcctggcaagatgcccatttgatgccagacaaaccaatgttgccctctttgctgatgggaagctgtattctgccacagtggctgacttcttggccagcgatgccgttatttatcgaagcatgggtgatggatctgcccttcgcacaataaaatatgattccaaatggataaaagagccacactttcttcatgccatagaatatggaaactatgtctatttcttctttcgagaaatcgctgtcgaacataataatttaggcaaggctgtgtattcccgcgtggcccgcatatgtaaaaacgacatgggtggttcccagcgggtcctggagaaacactggacttcatttctaaaggctcggctgaactgttctgtccctggagattcgtttttctactttgatgttctgcagtctattacagacataatacaaatcaatggcatccccactgtggtcggggtgtttaccacgcagctcaatagcatccctggttctgctgtctgtgcatttagcatggatgacattgaaaaagtattcaaaggacggtttaaggaacagaaaactccagattctgtttggacagcagttcccgaagacaaagtgccaaagccaaggcctggctgttgtgcaaaacacggccttgccgaagcttataaaacctccatcgatttcccggatgaaactctgtcattcatcaaatctcatcccctgatggactctgccgttccacccattgccgatgagccctggttcacaaagactcgggtcaggtacagactgacggccatctcagtggaccattcagccggaccctaccagaactacacagtcatctttgttggctctgaagctggcatggtacttaaagttctggcaaagaccagtcctttctctttgaacgacagcgtattactggaagagattgaagcctacaaccatgcaaagtgcagtgctgagaatgaggaagacaaaaaggtcatctcattacagttggataaagatcaccacgctttatatgtggcgttctctagctgcattatccgcatccccctcagtcgctgtgagcgttatggatcatgtaaaaagtcttgtattgcatctcgtgacccgtattgtggctggttaagccagggatcctgtggtagagtgaccccagggatgcttgctgaaggatatgaacaagacacagaattcggcaacacagctcatctaggggactgccatgaaattttgcctacttcaactacaccagattacaaaatatttggcggtccaacatctgacatggaggtatcttcatcttctgttaccacaatggcaagtatcccagaaatcacacctaaagtgattgatacctggagacctaaactgacaagctctcggaaatttgtagttcaagatgatccaaacacttctgattttactgatcctttatcgggtatcccaaagggtgtacgatgggaagtccagtctggagagtccaaccagatggtccacatgaatgtcctcatcacctgtgtctttgctgcttttgttttgggggcattcattgcaggtgtggcagtatactgctatcgagacatgtttgttcggaaaaacagaaagatccataaagatgcagagtccgcccagtcatgcacagactccagtggaagttttgccaaactgaatggtctctttgacagccctgtcaaggaataccaacagaatattgattctcctaaactgtatagtaacctgctaaccagtcggaaagagctaccacccaatggagatactaaatccatggtaatggaccatcgagggcaacctccagagttggctgctcttcccactcctgagtctacacccgtgcttcaccagaagaccctgcaggccatgaagagccactcagaaaaggcccatggccatggagcttcaaggaaagaaacccctcagttttttccgtctagtccgccacctcattccccattaagtcatgggcatatccccagtgccattgttcttccaaatgctacccatgactacaacacgtctttctcaaactccaatgctcacaaagctgaaaagaagcttcaaaacattgatcaccctctcacaaagtcatccagtaagagagatcaccggcgttctgttgattccagaaataccctcaatgatctcctgaagcatctgaatgacccaaatagtaaccccaaagccatcatgggagacatccagatggcacaccagaacttaatgctggatcccatgggatcgatgtctgaggtcccacctaaagtccctaaccgggaggcatcgctatactcccctccttcaactctccccagaaatagcccaaccaagcgagtggatgtccccaccactcctggagtcccaatgacttctctggaaagacaaagaggttatcacaaaaattcctcccagaggcactctatatctgctatgcctaaaaacttaaactcaccaaatggtgttttgttatccagacagcctagtatgaaccgtggaggatatatgcccacccccactggggcgaaggtggactatattcagggaacaccagtgagtgttcatctgcagccttccctctccagacagagcagctacaccagtaatggcactcttcctaggacgggactaaagaggacgccgtccttaaaacctgacgtgccaccaaagccttcctttgttcctcaaaccccatctgtcagaccactgaacaaatacacatactag

SEQ ID NO: 97 - protein, 1073 aa, Homo sapiens
MRVFLLCAYILLLMVSQLRAVSFPEDDEPLNTVDYHYSRQYPVFRGRPSGNESQHRLDFQLMLKIRDTLYIAGRDQVYTVNLNEMPKTEVIPNKKLTWRSRQQDRENCAMKGKHKDECHNFIKVFVPRNDEMVFVCGTNAFNPMCRYYRLSTLEYDGEEISGLARCPFDARQTNVALFADGKLYSATVADFLASDAVIYRSMGDGSALRTIKYDSKWIKEPHFLHAIEYGNYVYFFFREIAVEHNNLGKAVYSRVARICKNDMGGSQRVLEKHWTSFLKARLNCSVPGDSFFYFDVLQSITDIIQINGIPTVVGVFTTQLNSIPGSAVCAFSMDDIEKVFKGRFKEQKTPDSVWTAVPEDKVPKPRPGCCAKHGLAEAYKTSIDFPDETLSFIKSHPLMDSAVPPIADEPWFTKTRVRYRLTAISVDHSAGPYQNYTVIFVGSEAGMVLKVLAKTSPFSLNDSVLLEEIEAYNHAKCSAENEEDKKVISLQLDKDHHALYVAFSSCIIRIPLSRCERYGSCKKSCIASRDPYCGWLSQGSCGRVTPGMLAEGYEQDTEFGNTAHLGDCHEILPTSTTPDYKIFGGPTSDMEVSSSSVTTMASIPEITPKVIDTWRPKLTSSRKFVVQDDPNTSDFTDPLSGIPKGVRWEVQSGESNQMVHMNVLITCVFAAFVLGAFIAGVAVYCYRDMFVRKNRKIHKDAESAQSCTDSSGSFAKLNGLFDSPVKEYQQNIDSPKLYSNLLTSRKELPPNGDTKSMVMDHRGQPPELAALPTPESTPVLHQKTLQAMKSHSEKAHGHGASRKETPQFFPSSPPPHSPLSHGHIPSAIVLPNATHDYNTSFSNSNAHKAEKKLQNIDHPLTKSSSKRDHRRSVDSRNTLNDLLKHLNDPNSNPKAIMGDIQMAHQNLMLDPMGSMSEVPPKVPNREASLYSPPSTLPRNSPTKRVDVPTTPGVPMTSLERQRGYHKNSSQRHSISAMPKNLNSPNGVLLSRQPSMNRGGYMPTPTGAKVDYIQGTPVSVHLQPSLSRQSSYTSNGTLPRTGLKRTPSLKPDVPPKPSFVPQTPSVRPLNKYTY

SEQ ID NO: 98 - DNA, 2997 bp, Homo sapiens
  CDS (1)...(2997)
atgagggtcttcctgctttgtgcctacatactgctgctgatggtttcccagttgagggcagtcagctttcctgaagatgatgaaccccttaatactgtcgactatcactattcaaggcaatatccggtttttagaggacgcccttcaggcaatgaatcgcagcacaggctggactttcagctgatgttgaaaattcgagacacactttatattgctggcagggatcaagtttatacagtaaacttaaatgaaatgcccaaaacagaagtaatacccaacaagaaactgacatggcgatcaagacaacaggatcgagaaaactgtgctatgaaaggcaagcataaagatgaatgccacaactttatcaaagtatttgttccaagaaacgatgagatggtttttgtttgtggtaccaatgcattcaatcccatgtgtagatactacaggttgagtaccttagaatatgatggggaagaaattagtggcctggcaagatgcccatttgatgccagacaaaccaatgttgccctctttgctgatgggaagctgtattctgccacagtggctgacttcttggccagcgatgccgttatttatcgaagcatgggtgatggatctgcccttcgcacaataaaatatgattccaaatggataaaagagccacactttcttcatgccatagaatatggaaactatgtctatttcttctttcgagaaatcgctgtcgaacataataatttaggcaaggctgtgtattcccgcgtggcccgcatatgtaaaaacgacatgggtggttcccagcgggtcctggagaaacactggacttcatttctaaaggctcggctgaactgttctgtccctggagattcgtttttctactttgatgttctgcagtctattacagacataatacaaatcaatggcatccccactgtggtcggggtgtttaccacgcagctcaatagcatccctggttctgctgtctgtgcatttagcatggatgacattgaaaaagtattcaaaggacggtttaaggaacagaaaactccagattctgtttggacagcagttcccgaagacaaagtgccaaagccaaggcctggctgttgtgcaaaacacggccttgccgaagcttataaaacctccatcgatttcccggatgaaactctgtcattcatcaaatctcatcccctgatggactctgccgttccacccattgccgatgagccctggttcacaaagactcgggtcaggtacagactgacggccatctcagtggaccattcagccggaccctaccagaactacacagtcatctttgttggctctgaagctggcatggtacttaaagttctggcaaagaccagtcctttctctttgaacgacagcgtattactggaagagattgaagcctacaaccatgcaaagtgcagtgctgagaatgaggaagacaaaaaggtcatctcattacagttggataaagatcaccacgctttatatgtggcgttctctagctgcattatccgcatccccctcagtcgctgtgagcgttatggatcatgtaaaaagtcttgtattgcatctcgtgacccgtattgtggctggttaagccagggatcctgtggtagagtgaccccagggatgcttgctgaaggatatgaacaagacacagaattcggcaacacagctcatctaggggactgccatggtgtacgatgggaagtccagtctggagagtccaaccagatggtccacatgaatgtcctcatcacctgtgtctttgctgcttttgttttgggggcattcattgcaggtgtggcagtatactgctatcgagacatgtttgttcggaaaaacagaaagatccataaagatgcagagtccgcccagtcatgcacagactccagtggaagttttgccaaactgaatggtctctttgacagccctgtcaaggaataccaacagaatattgattctcctaaactgtatagtaacctgctaaccagtcggaaagagctaccacccaatggagatactaaatccatggtaatggaccatcgagggcaacctccagagttggctgctcttcccactcctgagtctacacccgtgcttcaccagaagaccctgcaggccatgaagagccactcagaaaaggcccatggccatggagcttcaaggaaagaaacccctcagttttttccgtctagtccgccacctcattccccattaagtcatgggcatatccccagtgccattgttcttccaaatgctacccatgactacaacacgtctttctcaaactccaatgctcacaaagctgaaaagaagcttcaaaacattgatcaccctctcacaaagtcatccagtaagagagatcaccggcgttctgttgattccagaaataccctcaatgatctcctgaagcatctgaatgacccaaatagtaaccccaaagccatcatgggagacatccagatggcacaccagaacttaatgctggatcccatgggatcgatgtctgaggtcccacctaaagtccctaaccgggaggcatcgctatactcccctccttcaactctccccagaaatagcccaaccaagcgagtggatgtccccaccactcctggagtcccaatgacttctctggaaagacaaagaggttatcacaaaaattcctcccagaggcactctatatctgctatgcctaaaaacttaaactcaccaaatggtgttttgttatccagacagcctagtatgaaccgtggaggatatatgcccacccccactggggcgaaggtggactatattcagggaacaccagtgagtgttcatctgcagccttccctctccagacagagcagctacaccagtaatggcactcttcctaggacgggactaaagaggacgccgtccttaaaacctgacgtgccaccaaagccttcctttgttcctcaaaccccatctgtcagaccactgaacaaatacacatactag

SEQ ID NO: 99 - protein, 998 aa, Homo sapiens
MRVFLLCAYILLLMVSQLRAVSFPEDDEPLNTVDYHYSRQYPVFRGRPSGNESQHRLDFQLMLKIRDTLYIAGRDQVYTVNLNEMPKTEVIPNKKLTWRSRQQDRENCAMKGKHKDECHNFIKVFVPRNDEMVFVCGTNAFNPMCRYYRLSTLEYDGEEISGLARCPFDARQTNVALFADGKLYSATVADFLASDAVIYRSMGDGSALRTIKYDSKWIKEPHFLHAIEYGNYVYFFFREIAVEHNNLGKAVYSRVARICKNDMGGSQRVLEKHWTSFLKARLNCSVPGDSFFYFDVLQSITDIIQINGIPTVVGVFTTQLNSIPGSAVCAFSMDDIEKVFKGRFKEQKTPDSVWTAVPEDKVPKPRPGCCAKHGLAEAYKTSIDFPDETLSFIKSHPLMDSAVPPIADEPWFTKTRVRYRLTAISVDHSAGPYQNYTVIFVGSEAGMVLKVLAKTSPFSLNDSVLLEEIEAYNHAKCSAENEEDKKVISLQLDKDHHALYVAFSSCIIRIPLSRCERYGSCKKSCIASRDPYCGWLSQGSCGRVTPGMLAEGYEQDTEFGNTAHLGDCHGVRWEVQSGESNQMVHMNVLITCVFAAFVLGAFIAGVAVYCYRDMFVRKNRKIHKDAESAQSCTDSSGSFAKLNGLFDSPVKEYQQNIDSPKLYSNLLTSRKELPPNGDTKSMVMDHRGQPPELAALPTPESTPVLHQKTLQAMKSHSEKAHGHGASRKETPQFFPSSPPPHSPLSHGHIPSAIVLPNATHDYNTSFSNSNAHKAEKKLQNIDHPLTKSSSKRDHRRSVDSRNTLNDLLKHLNDPNSNPKAIMGDIQMAHQNLMLDPMGSMSEVPPKVPNREASLYSPPSTLPRNSPTKRVDVPTTPGVPMTSLERQRGYHKNSSQRHSISAMPKNLNSPNGVLLSRQPSMNRGGYMPTPTGAKVDYIQGTPVSVHLQPSLSRQSSYTSNGTLPRTGLKRTPSLKPDVPPKPSFVPQTPSVRPLNKYTY

SEQ ID NO: 100 - DNA, 1431 bp, Homo sapiens
  CDS (1)...(1431)
atgagggtcttcctgctttgtgcctacatactgctgctgatggtttcccagttgagggcagtcagctttcctgaagatgatgaaccccttaatactgtcgactatcactattcaaggcaatatccggtttttagaggacgcccttcaggcaatgaatcgcagcacaggctggactttcagctgatgttgaaaattcgagacacactttatattgctggcagggatcaagtttatacagtaaacttaaatgaaatgcccaaaacagaagtaatacccaacaagaaactgacatggcgatcaagacaacaggatcgagaaaactgtgctatgaaaggcaagcataaagatgaatgccacaactttatcaaagtatttgttccaagaaacgatgagatggtttttgtttgtggtaccaatgcattcaatcccatgtgtagatactacaggttgagtaccttagaatatgatggggaagaaattagtggcctggcaagatgcccatttgatgccagacaaaccaatgttgccctctttgctgatgggaagctgtattctgccacagtggctgacttcttggccagcgatgccgttatttatcgaagcatgggtgatggatctgcccttcgcacaataaaatatgattccaaatggataaaagagccacactttcttcatgccatagaatatggaaactatgtctatttcttctttcgagaaatcgctgtcgaacataataatttaggcaaggctgtgtattcccgcgtggcccgcatatgtaaaaacgacatgggtggttcccagcgggtcctggagaaacactggacttcatttctaaaggctcggctgaactgttctgtccctggagattcgtttttctactttgatgttctgcagtctattacagacataatacaaatcaatggcatccccactgtggtcggggtgtttaccacgcagctcaatagcatccctggttctgctgtctgtgcatttagcatggatgacattgaaaaagtattcaaaggacggtttaaggaacagaaaactccagattctgtttggacagcagttcccgaagacaaagtgccaaagccaaggcctggctgttgtgcaaaacacggccttgccgaagcttataaaacctccatcgatttcccggatgaaactctgtcattcatcaaatctcatcccctgatggactctgccgttccacccattgccgatgagccctggttcacaaagactcgggtcaggtacagactgacggccatctcagtggaccattcagccggaccctaccagaactacacagtcatctttgttggctctgaagctggcatggtacttaaagttctggcaaagaccagtcctttctctttgaacgacagcgtattactggaagagattgaagcctacaaccatgcaaagtag

SEQ ID NO: 101 - protein, 476 aa, Homo sapiens
MRVFLLCAYILLLMVSQLRAVSFPEDDEPLNTVDYHYSRQYPVFRGRPSGNESQHRLDFQLMLKIRDTLYIAGRDQVYTVNLNEMPKTEVIPNKKLTWRSRQQDRENCAMKGKHKDECHNFIKVFVPRNDEMVFVCGTNAFNPMCRYYRLSTLEYDGEEISGLARCPFDARQTNVALFADGKLYSATVADFLASDAVIYRSMGDGSALRTIKYDSKWIKEPHFLHAIEYGNYVYFFFREIAVEHNNLGKAVYSRVARICKNDMGGSQRVLEKHWTSFLKARLNCSVPGDSFFYFDVLQSITDIIQINGIPTVVGVFTTQLNSIPGSAVCAFSMDDIEKVFKGRFKEQKTPDSVWTAVPEDKVPKPRPGCCAKHGLAEAYKTSIDFPDETLSFIKSHPLMDSAVPPIADEPWFTKTRVRYRLTAISVDHSAGPYQNYTVIFVGSEAGMVLKVLAKTSPFSLNDSVLLEEIEAYNHAK

SEQ ID NO: 102 - DNA, 3183 bp, Homo sapiens
  CDS (1)...(3183)
atggtttcccagttgagggcagtcagctttcctgaagatgatgaaccccttaatactgtcgactatcactattcaaggcaatatccggtttttagaggacgcccttcaggcaatgaatcgcagcacaggctggactttcagctgatgttgaaaattcgagacacactttatattgctggcagggatcaagtttatacagtaaacttaaatgaaatgcccaaaacagaagtaatacccaacaagaaactgacatggcgatcaagacaacaggatcgagaaaactgtgctatgaaaggcaagcataaagatgaatgccacaactttatcaaagtatttgttccaagaaacgatgagatggtttttgtttgtggtaccaatgcattcaatcccatgtgtagatactacaggttgagtaccttagaatatgatggggaagaaattagtggcctggcaagatgcccatttgatgccagacaaaccaatgttgccctctttgctgatgggaagctgtattctgccacagtggctgacttcttggccagcgatgccgttatttatcgaagcatgggtgatggatctgcccttcgcacaataaaatatgattccaaatggataaaagagccacactttcttcatgccatagaatatggaaactatgtctatttcttctttcgagaaatcgctgtcgaacataataatttaggcaaggctgtgtattcccgcgtggcccgcatatgtaaaaacgacatgggtggttcccagcgggtcctggagaaacactggacttcatttctaaaggctcggctgaactgttctgtccctggagattcgtttttctactttgatgttctgcagtctattacagacataatacaaatcaatggcatccccactgtggtcggggtgtttaccacgcagctcaatagcatccctggttctgctgtctgtgcatttagcatggatgacattgaaaaagtattcaaaggacggtttaaggaacagaaaactccagattctgtttggacagcagttcccgaagacaaagtgccaaagccaaggcctggctgttgtgcaaaacacggccttgccgaagcttataaaacctccatcgatttcccggatgaaactctgtcattcatcaaatctcatcccctgatggactctgccgttccacccattgccgatgagccctggttcacaaagactcgggtcaggtacagactgacggccatctcagtggaccattcagccggaccctaccagaactacacagtcatctttgttggctctgaagctggcatggtacttaaagttctggcaaagaccagtcctttctctttgaacgacagcgtattactggaagagattgaagcctacaaccatgcaaagtgcagtgctgagaatgaggaagacaaaaaggtcatctcattacagttggataaagatcaccacgctttatatgtggcgttctctagctgcattatccgcatccccctcagtcgctgtgagcgttatggatcatgtaaaaagtcttgtattgcatctcgtgacccgtattgtggctggttaagccagggatcctgtggtagagtgaccccagggatgcttgctgaaggatatgaacaagacacagaattcggcaacacagctcatctaggggactgccatgaaattttgcctacttcaactacaccagattacaaaatatttggcggtccaacatctgacatggaggtatcttcatcttctgttaccacaatggcaagtatcccagaaatcacacctaaagtgattgatacctggagacctaaactgacaagctctcggaaatttgtagttcaagatgatccaaacacttctgattttactgatcctttatcgggtatcccaaagggtgtacgatgggaagtccagtctggagagtccaaccagatggtccacatgaatgtcctcatcacctgtgtctttgctgcttttgttttgggggcattcattgcaggtgtggcagtatactgctatcgagacatgtttgttcggaaaaacagaaagatccataaagatgcagagtccgcccagtcatgcacagactccagtggaagttttgccaaactgaatggtctctttgacagccctgtcaaggaataccaacagaatattgattctcctaaactgtatagtaacctgctaaccagtcggaaagagctaccacccaatggagatactaaatccatggtaatggaccatcgagggcaacctccagagttggctgctcttcccactcctgagtctacacccgtgcttcaccagaagaccctgcaggccatgaagagccactcagaaaaggcccatggccatggagcttcaaggaaagaaacccctcagttttttccgtctagtccgccacctcattccccattaagtcatgggcatatccccagtgccattgttcttccaaatgctacccatgactacaacacgtctttctcaaactccaatgctcacaaagctgaaaagaagcttcaaaacattgatcaccctctcacaaagtcatccagtaagagagatcaccggcgttctgttgattccagaaataccctcaatgatctcctgaagcatctgaatgacccaaatagtaaccccaaagccatcatgggagacatccagatggcacaccagaacttaatgctggatcccatgggatcgatgtctgaggtcccacctaaagtccctaaccgggaggcatcgctatactcccctccttcaactctccccagaaatagcccaaccaagcgagtggatgtccccaccactcctggagtcccaatgacttctctggaaagacaaagaggttatcacaaaaattcctcccagaggcactctatatctgctatgcctaaaaacttaaactcaccaaatggtgttttgttatccagacagcctagtatgaaccgtggaggatatatgcccacccccactggggcgaaggtggactatattcagggaacaccagtgagtgttcatctgcagccttccctctccagacagagcagctacaccagtaatggcactcttcctaggacgggactaaagaggacgccgtccttaaaacctgacgtgccaccaaagccttcctttgttcctcaaaccccatctgtcagaccactgaacaaatacacatactag

SEQ ID NO: 103 - protein, 1060 aa, Homo sapiens [sequence omitted]

SEQ ID NO: 104 - DNA, 2958 bp, Homo sapiens
  CDS (1)...(2958)
atggtttcccagttgagggcagtcagctttcctgaagatgatgaaccccttaatactgtcgactatcactattcaaggcaatatccggtttttagaggacgcccttcaggcaatgaatcgcagcacaggctggactttcagctgatgttgaaaattcgagacacactttatattgctggcagggatcaagtttatacagtaaacttaaatgaaatgcccaaaacagaagtaatacccaacaagaaactgacatggcgatcaagacaacaggatcgagaaaactgtgctatgaaaggcaagcataaagatgaatgccacaactttatcaaagtatttgttccaagaaacgatgagatggtttttgtttgtggtaccaatgcattcaatcccatgtgtagatactacaggttgagtaccttagaatatgatggggaagaaattagtggcctggcaagatgcccatttgatgccagacaaaccaatgttgccctctttgctgatgggaagctgtattctgccacagtggctgacttcttggccagcgatgccgttatttatcgaagcatgggtgatggatctgcccttcgcacaataaaatatgattccaaatggataaaagagccacactttcttcatgccatagaatatggaaactatgtctatttcttctttcgagaaatcgctgtcgaacataataatttaggcaaggctgtgtattcccgcgtggcccgcatatgtaaaaacgacatgggtggttcccagcgggtcctggagaaacactggacttcatttctaaaggctcggctgaactgttctgtccctggagattcgtttttctactttgatgttctgcagtctattacagacataatacaaatcaatggcatccccactgtggtcggggtgtttaccacgcagctcaatagcatccctggttctgctgtctgtgcatttagcatggatgacattgaaaaagtattcaaaggacggtttaaggaacagaaaactccagattctgtttggacagcagttcccgaagacaaagtgccaaagccaaggcctggctgttgtgcaaaacacggccttgccgaagcttataaaacctccatcgatttcccggatgaaactctgtcattcatcaaatctcatcccctgatggactctgccgttccacccattgccgatgagccctggttcacaaagactcgggtcaggtacagactgacggccatctcagtggaccattcagccggaccctaccagaactacacagtcatctttgttggctctgaagctggcatggtacttaaagttctggcaaagaccagtcctttctctttgaacgacagcgtattactggaagagattgaagcctacaaccatgcaaagtgcagtgctgagaatgaggaagacaaaaaggtcatctcattacagttggataaagatcaccacgctttatatgtggcgttctctagctgcattatccgcatccccctcagtcgctgtgagcgttatggatcatgtaaaaagtcttgtattgcatctcgtgacccgtattgtggctggttaagccagggatcctgtggtagagtgaccccagggatgcttgctgaaggatatgaacaagacacagaattcggcaacacagctcatctaggggactgccatggtgtacgatgggaagtccagtctggagagtccaaccagatggtccacatgaatgtcctcatcacctgtgtctttgctgcttttgttttgggggcattcattgcaggtgtggcagtatactgctatcgagacatgtttgttcggaaaaacagaaagatccataaagatgcagagtccgcccagtcatgcacagactccagtggaagttttgccaaactgaatggtctctttgacagccctgtcaaggaataccaacagaatattgattctcctaaactgtatagtaacctgctaaccagtcggaaagagctaccacccaatggagatactaaatccatggtaatggaccatcgagggcaacctccagagttggctgctcttcccactcctgagtctacacccgtgcttcaccagaagaccctgcaggccatgaagagccactcagaaaaggcccatggccatggagcttcaaggaaagaaacccctcagttttttccgtctagtccgccacctcattccccattaagtcatgggcatatccccagtgccattgttcttccaaatgctacccatgactacaacacgtctttctcaaactccaatgctcacaaagctgaaaagaagcttcaaaacattgatcaccctctcacaaagtcatccagtaagagagatcaccggcgttctgttgattccagaaataccctcaatgatctcctgaagcatctgaatgacccaaatagtaaccccaaagccatcatgggagacatccagatggcacaccagaacttaatgctggatcccatgggatcgatgtctgaggtcccacctaaagtccctaaccgggaggcatcgctatactcccctccttcaactctccccagaaatagcccaaccaagcgagtggatgtccccaccactcctggagtcccaatgacttctctggaaagacaaagaggttatcacaaaaattcctcccagaggcactctatatctgctatgcctaaaaacttaaactcaccaaatggtgttttgttatccagacagcctagtatgaaccgtggaggatatatgcccacccccactggggcgaaggtggactatattcagggaacaccagtgagtgttcatctgcagccttccctctccagacagagcagctacaccagtaatggcactcttcctaggacgggactaaagaggacgccgtccttaaaacctgacgtgccaccaaagccttcctttgttcctcaaaccccatctgtcagaccactgaacaaatacacatactag

SEQ ID NO: 105 - protein, 985 aa, Homo sapiens [sequence omitted]

SEQ ID NO: 106 - DNA, 1392 bp, Homo sapiens
  CDS (1)...(1392)
atggtttcccagttgagggcagtcagctttcctgaagatgatgaaccccttaatactgtcgactatcactattcaaggcaatatccggtttttagaggacgcccttcaggcaatgaatcgcagcacaggctggactttcagctgatgttgaaaattcgagacacactttatattgctggcagggatcaagtttatacagtaaacttaaatgaaatgcccaaaacagaagtaatacccaacaagaaactgacatggcgatcaagacaacaggatcgagaaaactgtgctatgaaaggcaagcataaagatgaatgccacaactttatcaaagtatttgttccaagaaacgatgagatggtttttgtttgtggtaccaatgcattcaatcccatgtgtagatactacaggttgagtaccttagaatatgatggggaagaaattagtggcctggcaagatgcccatttgatgccagacaaaccaatgttgccctctttgctgatgggaagctgtattctgccacagtggctgacttcttggccagcgatgccgttatttatcgaagcatgggtgatggatctgcccttcgcacaataaaatatgattccaaatggataaaagagccacactttcttcatgccatagaatatggaaactatgtctatttcttctttcgagaaatcgctgtcgaacataataatttaggcaaggctgtgtattcccgcgtggcccgcatatgtaaaaacgacatgggtggttcccagcgggtcctggagaaacactggacttcatttctaaaggctcggctgaactgttctgtccctggagattcgtttttctactttgatgttctgcagtctattacagacataatacaaatcaatggcatccccactgtggtcggggtgtttaccacgcagctcaatagcatccctggttctgctgtctgtgcatttagcatggatgacattgaaaaagtattcaaaggacggtttaaggaacagaaaactccagattctgtttggacagcagttcccgaagacaaagtgccaaagccaaggcctggctgttgtgcaaaacacggccttgccgaagcttataaaacctccatcgatttcccggatgaaactctgtcattcatcaaatctcatcccctgatggactctgccgttccacccattgccgatgagccctggttcacaaagactcgggtcaggtacagactgacggccatctcagtggaccattcagccggaccctaccagaactacacagtcatctttgttggctctgaagctggcatggtacttaaagttctggcaaagaccagtcctttctctttgaacgacagcgtattactggaagagattgaagcctacaaccatgcaaagtag

SEQ ID NO: 107 - protein, 463 aa, Homo sapiens
MVSQLRAVSFPEDDEPLNTVDYHYSRQYPVFRGRPSGNESQHRLDFQLMLKIRDTLYIAGRDQVYTVNLNEMPKTEVIPNKKLTWRSRQQDRENCAMKGKHKDECHNFIKVFVPRNDEMVFVCGTNAFNPMCRYYRLSTLEYDGEEISGLARCPFDARQTNVALFADGKLYSATVADFLASDAVIYRSMGDGSALRTIKYDSKWIKEPHFLHAIEYGNYVYFFFREIAVEHNNLGKAVYSRVARICKNDMGGSQRVLEKHWTSFLKARLNCSVPGDSFFYFDVLQSITDIIQINGIPTVVGVFTTQLNSIPGSAVCAFSMDDIEKVFKGRFKEQKTPDSVWTAVPEDKVPKPRPGCCAKHGLAEAYKTSIDFPDETLSFIKSHPLMDSAVPPIADEPWFTKTRVRYRLTAISVDHSAGPYQNYTVIFVGSEAGMVLKVLAKTSPFSLNDSVLLEEIEAYNHAK

SEQ ID NO: 108 - DNA, 3753 bp, Homo sapiens
ttttacaatatttttctttattttctttcttccttgcgcgtggcaagcttttttttttctttttcttttttcttaccagcctccccccaatgaggtagctcagtggcatttctgagcaggggccaccctgacttcaccttggcccaccatgagggtcttcctgctttgtgcctacatactgctgctgatggtttcccagttgagggcagtcagctttcctgaagatgatgaaccccttaatactgtcgactatcactattcaaggcaatatccggtttttagaggacgcccttcaggcaatgaatcgcagcacaggctggactttcagctgatgttgaaaattcgagacacactttatattgctggcagggatcaagtttatacagtaaacttaaatgaaatgcccaaaacagaagtaatacccaacaagaaactgacatggcgatcaagacaacaggatcgagaaaactgtgctatgaaaggcaagcataaagatgaatgccacaactttatcaaagtatttgttccaagaaacgatgagatggtttttgtttgtggtaccaatgcattcaatcccatgtgtagatactacaggttgagtaccttagaatatgatggggaagaaattagtggcctggcaagatgcccatttgatgccagacaaaccaatgttgccctctttgctgatgggaagctgtattctgccacagtggctgacttcttggccagcgatgccgttatttatcgaagcatgggtgatggatctgcccttcgcacaataaaatatgattccaaatggataaaagagccacactttcttcatgccatagaatatggaaactatgtctatttcttctttcgagaaatcgctgtcgaacataataatttaggcaaggctgtgtattcccgcgtggcccgcatatgtaaaaacgacatgggtggttcccagcgggtcctggagaaacactggacttcatttctaaaggctcggctgaactgttctgtccctggagattcgtttttctactttgatgttctgcagtctattacagacataatacaaatcaatggcatccccactgtggtcggggtgtttaccacgcagctcaatagcatccctggttctgctgtctgtgcatttagcatggatgacattgaaaaagtattcaaaggacggtttaaggaacagaaaactccagattctgtttggacagcagttcccgaagacaaagtgccaaagccaaggcctggctgttgtgcaaaacacggccttgccgaagcttataaaacctccatcgatttcccggatgaaactctgtcattcatcaaatctcatcccctgatggactctgccgttccacccattgccgatgagccctggttcacaaagactcgggtcaggtacagactgacggccatctcagtggaccattcagccggaccctaccagaactacacagtcatctttgttggctctgaagctggcatggtacttaaagttctggcaaagaccagtcctttctctttgaacgacagcgtattactggaagagattgaagcctacaaccatgcaaagtgcagtgctgagaatgaggaagacaaaaaggtcatctcattacagttggataaagatcaccacgctttatatgtggcgttctctagctgcattatccgcatccccctcagtcgctgtgagcgttatggatcatgtaaaaagtcttgtattgcatctcgtgacccgtattgtggctggttaagccagggatcctgtggtagagtgaccccagggatgcttgctgaaggatatgaacaagacacagaattcggcaacacagctcatctaggggactgccatgaaattttgcctacttcaactacaccagattacaaaatatttggcggtccaacatctgacatggaggtatcttcatcttctgttaccacaatggcaagtatcccagaaatcacacctaaagtgattgatacctggagacctaaactgacaagctctcggaaatttgtagttcaagatgatccaaacacttctgattttactgatcctttatcgggtatcccaaagggtgtacgatgggaagtccagtctggagagtccaaccagatggtccacatgaatgtcctcatcacctgtgtctttgctgcttttgttttgggggcattcattgcaggtgtggcagtatactgctatcgagacatgtttgttcggaaaaacagaaagatccataaagatgcagagtccgcccagtcatgcacagactccagtggaagttttgccaaactgaatggtctctttgacagccctgtcaaggaataccaacagaatattgattctcctaaactgtatagtaacctgctaaccagtcggaaagagctaccacccaatggagatactaaatccatggtaatggaccatcgagggcaacctccagagttggctgctcttcccactcctgagtctacacccgtgcttcaccagaagaccctgcaggccatgaagagccactcagaaaaggcccatggccatggagcttcaaggaaagaaacccctcagttttttccgtctagtccgccacctcattccccattaagtcatgggcatatccccagtgccattgttcttccaaatgctacccatgactacaacacgtctttctcaaactccaatgctcacaaagctgaaaagaagcttcaaaacattgatcaccctctcacaaagtcatccagtaagagagatcaccggcgttctgttgattccagaaataccctcaatgatctcctgaagcatctgaatgacccaaatagtaaccccaaagccatcatgggagacatccagatggcacaccagaacttaatgctggatcccatgggatcgatgtctgaggtcccacctaaagtccctaaccgggaggcatcgctatactcccctccttcaactctccccagaaatagcccaaccaagcgagtggatgtccccaccactcctggagtcccaatgacttctctggaaagacaaagaggttatcacaaaaattcctcccagaggcactctatatctgctatgcctaaaaacttaaactcaccaaatggtgttttgttatccagacagcctagtatgaaccgtggaggatatatgcccacccccactggggcgaaggtggactatattcagggaacaccagtgagtgttcatctgcagccttccctctccagacagagcagctacaccagtaatggcactcttcctaggacgggactaaagaggacgccgtccttaaaacctgacgtgccaccaaagccttcctttgttcctcaaaccccatctgtcagaccactgaacaaatacacatactaggcctcaagtgtgctattcccatgtggctttatcctgtccgtgttgttgagaggatgatgttgtaagggtaccttaaaacaagagactcgcttgtattttaagagaaccaagtggccaaagaaactctttctaactttggcaacatcagaacttgccacatgtagctactgcagcaaggcttctgtgtacttgcctgaaaacaaaggaaggtgctggtcattccatttcttttgtttgaagctaaagagatgtgtagctcacaggggctaccttaccagtataaagagctgataacagtactcagaagaatctgtgaacaaatacttgaaaatgggttcaatgtagactgccattatgtgtggtcttcccattaaatgtgaaca

SEQ ID NO: 109 - DNA, 8262 bp, Homo sapiens
  CDS (1)...(8262)
atggacgtgaaggagaggaagccttaccgctcgctgacccggcgccgcgacgccgagcgccgctacaccagctcgtccgcggacagcgaggagggcaaagccccgcagaaatcgtacagctccagcgagaccctgaaggcctacgaccaggacgcccgcctagcctatggcagccgcgtcaaggacattgtgccgcaggaggccgaggaattctgccgcacaggtgccaacttcaccctgcgggagctggggctggaagaagtaacgccccctcacgggaccctgtaccggacagacattggcctcccccactgcggctactccatgggggctggctctgatgccgacatggaggctgacacggtgctgtcccctgagcaccccgtgcgtctgtggggccggagcacacggtcagggcgcagctcctgcctgtccagccgggccaattccaatctcacactcaccgacaccgagcatgaaaacactgagactgatcatccgggcggcctgcagaaccacgcgcggctccggacgccgccgccgccgctctcgcacgcccacacccccaaccagcaccacgcggcctccattaactccctgaaccggggcaacttcacgccgaggagcaaccccagcccggcccccacggaccactcgctctccggagagccccctgccggcggcgcccaggagcctgcccacgcccaggagaactggctgctcaacagcaacatccccctggagaccagaaacctaggcaagcagccattcctagggacattgcaggacaacctcattgagatggacattctcggcgcctcccgccatgatggggcttacagtgacgggcacttcctcttcaagcctggaggcacctccccgctcttctgcaccacatcaccagggtacccactgacgtccagcacagtgtactctcctccgccccgacccctgccccgcagcaccttcgcccggccggcctttaacctcaagaagccctccaagtactgtaactggaagtgcgcagccctgagcgccatcgtcatctcagccactctggtcatcctgctggcatactttgtggccatgcacctgtttggcctaaactggcacctgcagccgatggaggggcagatgtatgagatcacggaggacacagccagcagttggcctgtgccaaccgacgtctccctatacccctcagggggcactggcttagagacccctgacaggaaaggcaaaggaaccacagaaggaaagcccagtagtttctttccagaggacagtttcatagattctggagaaattgatgtgggaaggcgagcttcccagaagattcctcctggcactttctggagatctcaagtgttcatagaccatcctgtgcatctgaaattcaatgtgtctctgggaaaggcagccctggttggcatttatggcagaaaaggcctccctccttcacatacacagtttgactttgtggagctgctggatggcaggaggctcctaacccaggaggcgcggagcctagaggggaccccgcgccagtctcggggaactgtgcccccctccagccatgagacaggcttcatccagtatttggattcaggaatctggcacttggctttttacaatgacggaaaggagtcagaagtggtttcctttctcaccactgccattgagtcggtggataactgccccagcaactgctatggcaatggtgactgcatctctgggacctgccactgcttcctgggtttcctgggccccgactgtggcagagcctcctgccccgtgctctgtagcggaaatggccaatacatgaaaggcagatgcttgtgccacagtggctggaaaggcgctgagtgcgatgtgcccaccaaccagtgtatcgatgtggcctgcagcaaccatggcacctgcatcacgggcacctgcatctgcaaccctggctacaagggcgagagctgtgaggaagtggactgcatggaccccacatgttcaggccggggtgtctgcgtgagaggcgaatgccactgctctgtgggatggggaggcaccaactgcgagacccccagggccacatgcttagaccagtgttcaggccacggaaccttcctcccggacaccgggctttgcagctgtgacccaagctggactggacacgactgttctatcgagatctgtgctgccgactgtggtggccatggcgtgtgcgtagggggcacctgccgctgcgaggatggctggatgggggcagcctgcgaccagcgggcctgccacccgcgctgtgccgagcatgggacctgccgcgacggcaagtgcgagtgcagccctggctggaatggcgaacactgcaccatcgagggttgccctgggttgtgcaatggcaacggcagatgtaccttagacctgaatggttggcactgcgtctgccagctgggctggagaggagctggctgtgacacttccatggagactgcctgcggtgacagcaaagacaatgatggagatggcctggtggactgcatggaccctgactgctgcctccagcccctgtgccatatcaacccgctgtgccttggctcccctaaccctctggacatcatccaggagacacaggtccctgtgtcacagcagaacctacactccttctatgaccgcatcaagttcctcgtgggcagggacagcacgcacataatccccggggagaacccctttgatggagggcatgcttgtgttattcgtggccaagtgatgacatcagatggaacccccctggttggtgtgaacatcagttttgtcaataaccctctctttggatatacaatcagcaggcaagatggcagctttgacttggtgacaaatggcggcatctccatcatcctgcggttcgagcgggcacctttcatcacacaggagcacaccctgtggctgccatgggatcgcttctttgtcatggaaaccatcatcatgagacatgaggagaatgagattcccagctgtgacctgagcaattttgcccgccccaacccagtcgtctctccatccccactgacgtccttcgccagctcctgtgcagagaaaggccccattgtgccggaaattcaggctttgcaggaggaaatctctatctctggctgcaagatgaggctgagctacctgagcagccggacccctggctacaaatctgtcctgaggatcagcctcacccacccgaccatccccttcaacctcatgaaggtgcacctcatggtagcggtggagggccgcctcttcaggaagtggttcgctgcagccccagacctgtcctattatttcatttgggacaagacagacgtctacaaccagaaggtgtttgggctttcagaagcctttgtttccgtgggttatgaatatgaatcctgcccagatctaatcctgtgggaaaaaagaacaacagtgctgcagggctatgaaattgacgcgtccaagcttggaggatggagcctagacaaacatcatgccctcaacattcaaagtggcatcctgcacaaagggaatggggagaaccagtttgtgtctcagcagcctcctgtcattgggagcatcatgggcaatgggcgccggagaagcatctcctgccccagctgcaacggccttgctgacggcaacaagctcctggccccagtggccctcacctgtggctctgacgggagcctctatgtgggtgatttcaactacattagaaggatcttcccctctggaaatgtcaccaacatcctagagctgagtcacagtccagcacacaaatactacctggccacagaccccatgagtggggccgtcttcctttctgacagcaacagccggcgggtctttaaaatcaagtccactgtggtggtgaaggaccttgtcaagaactctgaggtggttgcggggacaggtgaccagtgcctcccctttgatgacactcgctgcggggatggtgggaaggccacagaagccacactcaccaatcccaggggcattacagtggacaagtttgggctgatctacttcgtggatggcaccatgatcagacgcatcgatcagaatgggatcatctccaccctgctcggctctaatgatctcacatcagcccggccactcagctgtgattctgtcatggatatttcccaggttcacctggagtggcccacagacttagccatcaacccaatggacaactcactttatgtcctcgacaacaatgtggtcctgcaaatctctgaaaaccaccaggtgcgcattgtcgccgggaggcccatgcactgccaggtccctggcattgaccacttcctgctaagcaaggtggccatccacgcaaccctggagtcagccaccgctttggctgtttcacacaatggggtcctgtatattgctgagactgatgagaaaaagatcaaccgcatcaggcaggtcaccactagtggagagatctcactcgttgctggggcccccagtggctgtgactgtaaaaatgatgccaactgtgattgtttttctggagacgatggttatgccaaggatgcaaagttaaataccccatcttccttggctgtgtgtgctgatggggagctctacgtggccgaccttgggaacatccgaattcggtttatccggaagaacaagcctttcctcaacacccagaacatgtatgagctgtcttcaccaattgaccaggagctctatctgtttgataccaccggcaagcacctgtacacccaaagcctgcccacaggagactacctgtacaacttcacctacactggggacggcgacatcacactcatcacagacaacaatggcaacatggtaaatgtccgccgagactctactgggatgcccctctggctggtggtcccagatggccaggtgtactgggtgaccatgggcaccaacagtgcactcaagagtgtgaccacacaaggacacgagttggccatgatgacataccatggcaattccggccttctggcaaccaaaagcaatgaaaacggatggacaacattttatgagtacgacagctttggccgcctgacaaatgtgaccttccctactggccaggtgagcagtttccgaagtgatacagacagttcagtgcatgtccaggtagagacctccagcaaggatgatgtcaccataaccaccaacctgtctgcctcaggcgccttctacacactgctgcaagaccaagtccggaacagctactacatcggggccgatggctccttgcggctgctgctggccaacggcatggaggtggcgctgcagactgagccccacttgctggctggcaccgtcaaccccaccgtgggcaagaggaatgtcacgctgcccatcgacaacggcctcaacctggtggagtggcgccagcgcaaagagcaggctcggggccaggtcactgtctttgggcgccggctgcgggttcacaaccgaaatctcctatctctggactttgatcgcgtaacacgcacagagaagatctatgatgaccaccgcaagttcacccttcggattctgtacgaccaggcggggcggcccagcctctggtcacccagcagcaggctgaatggtgtcaacgtgacatactcccctgggggttacattgctggcatccagaggggcatcatgtctgaaagaatggaatacgaccaggcgggccgcatcacatccaggatcttcgctgatgggaagacatggagctacacatacttagagaagtccatggtgctgctactacacagccagaggcagtatatctttgagttcgacaagaatgaccgcctctcttctgtgacgatgcccaacgtggcgcggcagacactagagaccatccgctcagtgggctactacagaaacatctatcagccccctgagggcaatgcctcagtcatacaggacttcactgaggatgggcacctccttcacaccttctacctgggcactggccgcagggtgatatacaagtatggcaaactgtcaaagctggcagagacgctctatgacaccaccaaggtcagtttcacctatgacgagacggcaggcatgctgaagaccatcaacctacagaatgagggcttcacctgcaccatccgctaccgtcagattgggcccctgattgaccgacagatcttccgcttcactgaggaaggcatggtcaacgcccgttttgactacaactatgacaacagcttccgggtgaccagcatgcaggctgtgatcaacgagaccccactgcccattgatctctatcgctatgatgatgtgtcaggcaagacagagcagtttgggaagtttggtgtcatttactatgacattaaccagatcatcaccacagctgtcatgacccacaccaagcattttgatgcatatggcaggatgaaggaagtgcagtatgagatcttccgctcgctcatgtactggatgaccgtccagtatgataacatggggcgagtagtgaagaaggagctgaaggtaggaccctacgccaataccactcgctactcctatgagtatgatgctgacggccagctgcagacagtctccatcaatgacaagccactctggcgctacagctacgacctcaatgggaacctgcacttactgagccctgggaacagtgcacggctcacaccactacggtatgacatccgcgaccgcatcactcggctgggtgacgtgcaatacaagatggatgaggatggcttcctgaggcagcggggcggtgatatctttgagtacaactcagctggcctgctcatcaaggcctacaaccgggctggcagctggagtgtcaggtaccgctacgatggcctggggcggcgcgtgtccagcaagagcagccacagccaccacctgcagttcttctatgcagacctgaccaaccccaccaaggtcacccacctgtacaaccactccagctctgagatcacctccctctactacgacttgcaaggacacctctttgccatggagctgagcagtggtgatgagttttacatagcttgtgacaacatcgggacccctcttgctgtctttagtggaacaggtttgatgatcaagcaaatcctgtacacagcctatggggagatctacatggataccaaccccaactttcagatcatcataggctaccatggtggcctctatgatccactcaccaagcttgtccacatgggccggcgagattatgatgtgctggccggacgctggactagcccagaccacgagctgtggaagcaccttagtagcagcaacgtcatgccttttaatctctatatgttcaaaaacaacaaccccatcagcaactcccaggacatcaagtgcttcatgacagatgttaacagctggctgctcacctttggattccagctacacaacgtgatccctggttatcccaaaccagacatggatgccatggaaccctcctacgagcttatccacacacagatgaaaacgcaggagtgggacaacagcaagtctatcctcggggtacagtgtgaagtacagaagcagctcaaggcctttgtcaccttagaacggtttgaccagctctatggctccacaatcaccagctgccagcaggctccaaagaccaagaagtttgcatccagcggctcagtctttggcaagggggtcaagtttgccttgaaggatggccgagtgaccacagacatcatcagtgtggccaatgaggatgggcgaagggttgctgccatcttgaaccatgcccactacctagagaacctgcacttcaccattgatggggtggatacccattactttgtgaaaccaggaccttcagaaggtgacctggccatcctgggcctcagtggggggcggcgaaccctggagaatggggtcaacgtcactgtgtcccagatcaacacagtacttaatggcaggactagacgctacacagacatccagctccagtacggggcactgtgcttgaacacacgctacgggacaacgttggatgaggagaaggcacgggtcctggagctggcccggcagagagccgtgcgccaagcgtgggcccgcgagcagcagagactgcgggaaggggaggaaggcctgcgggcctggacagagggggagaagcagcaggtgctgagcacagggcgggtgcaaggctacgacggctttttcgtgatctctgtcgagcagtacccagaactgtcagacagcgccaacaacatccacttcatgagacagagcgagatgggccggaggtga

SEQ ID NO: 110 - protein, 2753 aa, Homo sapiens [sequence omitted]

SEQ ID NO: 111 - DNA, 4875 bp, Homo sapiens
  CDS (1)...(4875)
atggacgtgaaggagaggaagccttaccgctcgctgacccggcgccgcgacgccgagcgccgctacaccagctcgtccgcggacagcgaggagggcaaagccccgcagaaatcgtacagctccagcgagaccctgaaggcctacgaccaggacgcccgcctagcctatggcagccgcgtcaaggacattgtgccgcaggaggccgaggaattctgccgcacaggtgccaacttcaccctgcgggagctggggctggaagaagtaacgccccctcacgggaccctgtaccggacagacattggcctcccccactgcggctactccatgggggctggctctgatgccgacatggaggctgacacggtgctgtcccctgagcaccccgtgcgtctgtggggccggagcacacggtcagggcgcagctcctgcctgtccagccgggccaattccaatctcacactcaccgacaccgagcatgaaaacactgagactgatcatccgggcggcctgcagaaccacgcgcggctccggacgccgccgccgccgctctcgcacgcccacacccccaaccagcaccacgcggcctccattaactccctgaaccggggcaacttcacgccgaggagcaaccccagcccggcccccacggaccactcgctctccggagagccccctgccggcggcgcccaggagcctgcccacgcccaggagaactggctgctcaacagcaacatccccctggagaccagaaacctaggcaagcagccattcctagggacattgcaggacaacctcattgagatggacattctcggcgcctcccgccatgatggggcttacagtgacgggcacttcctcttcaagcctggaggcacctccccgctcttctgcaccacatcaccagggtacccactgacgtccagcacagtgtactctcctccgccccgacccctgccccgcagcaccttcgcccggccggcctttaacctcaagaagccctccaagtactgtaactggaagtgcgcagccctgagcgccatcgtcatctcagccactctggtcatcctgctggcatactttgtggccatgcacctgtttggcctaaactggcacctgcagccgatggaggggcagatgtatgagatcacggaggacacagccagcagttggcctgtgccaaccgacgtctccctatacccctcagggggcactggcttagagacccctgacaggaaaggcaaaggaaccacagaaggaaagcccagtagtttctttccagaggacagtttcatagattctggagaaattgatgtgggaaggcgagcttcccagaagattcctcctggcactttctggagatctcaagtgttcatagaccatcctgtgcatctgaaattcaatgtgtctctgggaaaggcagccctggttggcatttatggcagaaaaggcctccctccttcacatacacagtttgactttgtggagctgctggatggcaggaggctcctaacccaggaggcgcggagcctagaggggaccccgcgccagtctcggggaactgtgcccccctccagccatgagacaggcttcatccagtatttggattcaggaatctggcacttggctttttacaatgacggaaaggagtcagaagtggtttcctttctcaccactgccattgagtcggtggataactgccccagcaactgctatggcaatggtgactgcatctctgggacctgccactgcttcctgggtttcctgggccccgactgtggcagagcctcctgccccgtgctctgtagcggaaatggccaatacatgaaaggcagatgcttgtgccacagtggctggaaaggcgctgagtgcgatgtgcccaccaaccagtgtatcgatgtggcctgcagcaaccatggcacctgcatcacgggcacctgcatctgcaaccctggctacaagggcgagagctgtgaggaagtggactgcatggaccccacatgttcaggccggggtgtctgcgtgagaggcgaatgccactgctctgtgggatggggaggcaccaactgcgagacccccagggccacatgcttagaccagtgttcaggccacggaaccttcctcccggacaccgggctttgcagctgtgacccaagctggactggacacgactgttctatcgagatctgtgctgccgactgtggtggccatggcgtgtgcgtagggggcacctgccgctgcgaggatggctggatgggggcagcctgcgaccagcgggcctgccacccgcgctgtgccgagcatgggacctgccgcgacggcaagtgcgagtgcagccctggctggaatggcgaacactgcaccatcgagggttgccctgggttgtgcaatggcaacggcagatgtaccttagacctgaatggttggcactgcgtctgccagctgggctggagaggagctggctgtgacacttccatggagactgcctgcggtgacagcaaagacaatgatggagatggcctggtggactgcatggaccctgactgctgcctccagcccctgtgccatatcaacccgctgtgccttggctcccctaaccctctggacatcatccaggagacacaggtccctgtgtcacagcagaacctacactccttctatgaccgcatcaagttcctcgtgggcagggacagcacgcacataatccccggggagaacccctttgatggagggcatgcttgtgttattcgtggccaagtgatgacatcagatggaacccccctggttggtgtgaacatcagttttgtcaataaccctctctttggatatacaatcagcaggcaagatggcagctttgacttggtgacaaatggcggcatctccatcatcctgcggttcgagcgggcacctttcatcacacaggagcacaccctgtggctgccatgggatcgcttctttgtcatggaaaccatcatcatgagacatgaggagaatgagattcccagctgtgacctgagcaattttgcccgccccaacccagtcgtctctccatccccactgacgtccttcgccagctcctgtgcagagaaaggccccattgtgccggaaattcaggctttgcaggaggaaatctctatctctggctgcaagatgaggctgagctacctgagcagccggacccctggctacaaatctgtcctgaggatcagcctcacccacccgaccatccccttcaacctcatgaaggtgcacctcatggtagcggtggagggccgcctcttcaggaagtggttcgctgcagccccagacctgtcctattatttcatttgggacaagacagacgtctacaaccagaaggtgtttgggctttcagaagcctttgtttccgtgggttatgaatatgaatcctgcccagatctaatcctgtgggaaaaaagaacaacagtgctgcagggctatgaaattgacgcgtccaagcttggaggatggagcctagacaaacatcatgccctcaacattcaaagtggcatcctgcacaaagggaatggggagaaccagtttgtgtctcagcagcctcctgtcattgggagcatcatgggcaatgggcgccggagaagcatctcctgccccagctgcaacggccttgctgacggcaacaagctcctggccccagtggccctcacctgtggctctgacgggagcctctatgtgggtgatttcaactacattagaaggatcttcccctctggaaatgtcaccaacatcctagagctgagtcacagtccagcacacaaatactacctggccacagaccccatgagtggggccgtcttcctttctgacagcaacagccggcgggtctttaaaatcaagtccactgtggtggtgaaggaccttgtcaagaactctgaggtggttgcggggacaggtgaccagtgcctcccctttgatgacactcgctgcggggatggtgggaaggccacagaagccacactcaccaatcccaggggcattacagtggacaagtttgggctgatctacttcgtggatggcaccatgatcagacgcatcgatcagaatgggatcatctccaccctgctcggctctaatgatctcacatcagcccggccactcagctgtgattctgtcatggatatttcccaggttcacctggagtggcccacagacttagccatcaacccaatggacaactcactttatgtcctcgacaacaatgtggtcctgcaaatctctgaaaaccaccaggtgcgcattgtcgccgggaggcccatgcactgccaggtccctggcattgaccacttcctgctaagcaaggtggccatccacgcaaccctggagtcagccaccgctttggctgtttcacacaatggggtcctgtatattgctgagactgatgagaaaaagatcaaccgcatcaggcaggtcaccactagtggagagatctcactcgttgctggggcccccagtggctgtgactgtaaaaatgatgccaactgtgattgtttttctggagacgatggttatgccaaggatgcaaagttaaataccccatcttccttggctgtgtgtgctgatggggagctctacgtggccgaccttgggaacatccgaattcggtttatccggaagaacaagcctttcctcaacacccagaacatgtatgagctgtcttcaccaattgaccaggagctctatctgtttgataccaccggcaagcacctgtacacccaaagcctgcccacaggagactacctgtacaacttcacctacactggggacggcgacatcacactcatcacagacaacaatggcaacatggtaaatgtccgccgagactctactgggatgcccctctga

SEQ ID NO: 112 - protein, 1624 aa, Homo sapiens
MDVKERKPYRSLTRRRDAERRYTSSSADSEEGKAPQKSYSSSETLKAYDQDARLAYGSRVKDIVPQEAEEFCRTGANFTLRELGLEEVTPPHGTLYRTDIGLPHCGYSMGAGSDADMEADTVLSPEHPVRLWGRSTRSGRSSCLSSRANSNLTLTDTEHENTETDHPGGLQNHARLRTPPPPLSHAHTPNQHHAASINSLNRGNFTPRSNPSPAPTDHSLSGEPPAGGAQEPAHAQENWLLNSNIPLETRNLGKQPFLGTLQDNLIEMDILGASRHDGAYSDGHFLFKPGGTSPLFCTTSPGYPLTSSTVYSPPPRPLPRSTFARPAFNLKKPSKYCNWKCAALSAIVISATLVILLAYFVAMHLFGLNWHLQPMEGQMYEITEDTASSWPVPTDVSLYPSGGTGLETPDRKGKGTTEGKPSSFFPEDSFIDSGEIDVGRRASQKIPPGTFWRSQVFIDHPVHLKFNVSLGKAALVGIYGRKGLPPSHTQFDFVELLDGRRLLTQEARSLEGTPRQSRGTVPPSSHETGFIQYLDSGIWHLAFYNDGKESEVVSFLTTAIESVDNCPSNCYGNGDCISGTCHCFLGFLGPDCGRASCPVLCSGNGQYMKGRCLCHSGWKGAECDVPTNQCIDVACSNHGTCITGTCICNPGYKGESCEEVDCMDPTCSGRGVCVRGECHCSVGWGGTNCETPRATCLDQCSGHGTFLPDTGLCSCDPSWTGHDCSIEICAADCGGHGVCVGGTCRCEDGWMGAACDQRACHPRCAEHGTCRDGKCECSPGWNGEHCTIEGCPGLCNGNGRCTLDLNGWHCVCQLGWRGAGCDTSMETACGDSKDNDGDGLVDCMDPDCCLQPLCHINPLCLGSPNPLDIIQETQVPVSQQNLHSFYDRIKFLVGRDSTHIIPGENPFDGGHACVIRGQVMTSDGTPLVGVNISFVNNPLFGYTISRQDGSFDLVTNGGISIILRFERAPFITQEHTLWLPWDRFFVMETIIMRHEENEIPSCDLSNFARPNPVVSPSPLTSFASSCAEKGPIVPEIQALQEEISISGCKMRLSYLSSRTPGYKSVLRISLTHPTIPFNLMKVHLMVAVEGRLFRKWFAAAPDLSYYFIWDKTDVYNQKVFGLSEAFVSVGYEYESCPDLILWEKRTTVLQGYEIDASKLGGWSLDKHHALNIQSGILHKGNGENQFVSQQPPVIGSIMGNGRRRSISCPSCNGLADGNKLLAPVALTCGSDGSLYVGDFNYIRRIFPSGNVTNILELSHSPAHKYYLATDPMSGAVFLSDSNSRRVFKIKSTVVVKDLVKNSEVVAGTGDQCLPFDDTRCGDGGKATEATLTNPRGITVDKFGLIYFVDGTMIRRIDQNGIISTLLGSNDLTSARPLSCDSVMDISQVHLEWPTDLAINPMDNSLYVLDNNVVLQISENHQVRIVAGRPMHCQVPGIDHFLLSKVAIHATLESATALAVSHNGVLYIAETDEKKINRIRQVTTSGEISLVAGAPSGCDCKNDANCDCFSGDDGYAKDAKLNTPSSLAVCADGELYVADLGNIRIRFIRKNKPFLNTQNMYELSSPIDQELYLFDTTGKHLYTQSLPTGDYLYNFTYTGDGDITLITDNNGNMVNVRRDSTGMPL

SEQ ID NO: 113 - DNA, 3423 bp, Homo sapiens
  CDS (1)...(3423)
atggttatttctttgaactcatgcctgagctttatttgtttattgttatgccactggattgggacagcatcacctctgaatcttgaagaccctaatgtgtgtagccactgggaaagctactcagtgactgtgcaagagtcatacccacatccctttgatcaaatttactacacgagctgcactgacattctaaactggtttaaatgcacgcggcacagagtcagctatcggacagcctatcgacatggggagaagactatgtataggcgcaagtctcagtgttgtcctggattttatgaaagcggggaaatgtgtgtcccccactgtgctgataaatgtgtccatggtcgctgtattgctccaaacacctgtcagtgtgagcctggctggggagggaccaactgctccagtgcctgcgatggtgatcactggggtccccactgcaccagccggtgccagtgcaaaaatggggctctgtgcaaccccatcaccggggcttgccactgtgctgcgggcttccggggctggcgctgcgaggaccgctgtgagcagggcacctatggtaacgactgtcatcagagatgccagtgccagaatggagccacctgcgaccacgtcacgggggaatgccgctgcccaccaggatacaccggagccttctgtgaggatctttgtcctcctggtaaacatggtccacagtgtgagcagagatgcccttgtcaaaatggaggagtgtgtcatcacgtcactggagaatgctcttgcccttctggctggatgggcacagtgtgtggtcagccttgccccgagggtcgctttggaaagaactgttcccaagaatgccagtgccataatggagggacgtgtgatgctgccacaggccaatgtcattgcagtccaggatacacaggggaacggtgccaggatgagtgtcctgttgggacctatggcgttctctgtgctgagacctgccagtgtgtcaacggagggaagtgttaccacgtgagcggcgcatgcctctgtgaagcaggctttgctggcgagcgctgcgaagcacgcctgtgtcctgaggggctctacggcatcaaatgtgacaaacggtgtccctgccacttggaaaacactcatagctgtcaccccatgtctggagagtgtgcctgcaagccgggctggtcaggactctactgtaatgagacatgttctcctggattctacggggaagcttgccagcagatctgcagctgccaaaatggggcagactgtgacagtgtgactggaaagtgcacctgtgccccaggattcaaaggaattgactgctctaccccatgccctctgggaacctatgggataaactgttcctctcgctgtggctgtaaaaatgatgcagtctgctctcctgtggacgggtcttgtacttgcaaggcaggctggcacggggtggactgctccatcagatgtcccagtggcacatggggctttggctgtaacttaacatgccagtgcctcaacgggggagcctgcaacaccctggacgggacctgcacgtgtgcacctggatggcgcggggagaaatgcgaacttccctgccaggatggcacgtacgggctgaactgtgctgagcgctgcgactgcagccacgcagatggctgccaccctaccacgggccattgccgctgcctcccgggatggtcaggtgtccactgtgacagcgtgtgtgctgagggacgctggggccccaactgctccctgccctgctactgtaaaaatggggcttcatgctcccctgatgatggcatctgcgagtgtgcaccaggcttccgaggcaccacttgtcagaggatctgctcccctggtttttatgggcatcgctgcagccagacatgcccacagtgcgttcacagcagcgggccctgccaccacatcaccggcctgtgtgactgcttgcctggcttcacaggcgccctctgcaatgaagtgtgtcccagtggcagatttgggaaaaactgtgcaggaatttgtacctgcaccaacaacggaacctgtaaccccattgacagatcttgtcagtgttaccccggttggattggcagtgactgctctcaaccatgtccacctgcccactggggcccaaactgcatccacacgtgcaactgccataatggagctttctgcagcgcctacgatggggaatgtaaatgcactcctggctggacagggctctactgcactcagagatgtcctctagggttttatggaaaagattgtgcactgatatgccaatgtcaaaacggagctgactgcgaccacatttctgggcagtgtacttgccgcactggattcatgggacggcactgtgagcagaagtgcccttcaggaacatatggctatggctgtcgccagatatgtgattgtctgaacaactccacctgcgaccacatcactgggacctgttactgcagccccggatggaagggagcgagatgtgatcaagctggtgttatcatagttggaaatctgaacagcttaagccgaaccagtactgctctccctgctgattcctaccagatcggggccattgcaggcatcatcattcttgtcctagttgttctcttcctactggcattgttcattatttatagacacaagcagaagggaaaggaatcaagcatgccagcagttacctacacccctgctatgagggtcgtcaatgcagattataccatttcaggaacccttcctcacagcaatggtggaaacgctaatagccactacttcaccaatcccagttaccacacgctcacccagtgtgccacatcccctcacgtcaacaacagggacaggatgactgtcacgaagtcaaaaaacaatcaactgtttgtgaatcttaaaaatgtgaaccctgggaagagaggccctgtgggggactgcactgggacattgccggctgactggaaacatggcggctacctcaacgagctcggtgcttttggacttgacagaagctatatgggaaaatccttaaaagacctgggaaagaattctgaatataattcaagtaactgctccctaagcagttctgagaacccatatgccactattaaagacccacctgtacttatcccgaaaagctcagagtgtggttatgtggagatgaaatcgccggcacgaagagattccccatatgcagagatcaataactcaacttcagccaacaggaatgtctatgaagttgaacctacagtgagtgttgtccaaggagtattcagcaataatgggcgtctctcccaggatccatatgacctcccaaagaacagtcacatcccttgtcattatgacctgctgccagtccgagacagttcatcctcccctaagcaagaggacagtggaggtagcagcagcaacagcagcagcagcagtgaatga

SEQ ID NO: 114 - protein, 1140 aa, Homo sapiens
MVISLNSCLSFICLLLCHWIGTASPLNLEDPNVCSHWESYSVTVQESYPHPFDQIYYTSCTDILNWFKCTRHRVSYRTAYRHGEKTMYRRKSQCCPGFYESGEMCVPHCADKCVHGRCIAPNTCQCEPGWGGTNCSSACDGDHWGPHCTSRCQCKNGALCNPITGACHCAAGFRGWRCEDRCEQGTYGNDCHQRCQCQNGATCDHVTGECRCPPGYTGAFCEDLCPPGKHGPQCEQRCPCQNGGVCHHVTGECSCPSGWMGTVCGQPCPEGRFGKNCSQECQCHNGGTCDAATGQCHCSPGYTGERCQDECPVGTYGVLCAETCQCVNGGKCYHVSGACLCEAGFAGERCEARLCPEGLYGIKCDKRCPCHLENTHSCHPMSGECACKPGWSGLYCNETCSPGFYGEACQQICSCQNGADCDSVTGKCTCAPGFKGIDCSTPCPLGTYGINCSSRCGCKNDAVCSPVDGSCTCKAGWHGVDCSIRCPSGTWGFGCNLTCQCLNGGACNTLDGTCTCAPGWRGEKCELPCQDGTYGLNCAERCDCSHADGCHPTTGHCRCLPGWSGVHCDSVCAEGRWGPNCSLPCYCKNGASCSPDDGICECAPGFRGTTCQRICSPGFYGHRCSQTCPQCVHSSGPCHHITGLCDCLPGFTGALCNEVCPSGRFGKNCAGICTCTNNGTCNPIDRSCQCYPGWIGSDCSQPCPPAHWGPNCIHTCNCHNGAFCSAYDGECKCTPGWTGLYCTQRCPLGFYGKDCALICQCQNGADCDHISGQCTCRTGFMGRHCEQKCPSGTYGYGCRQICDCLNNSTCDHITGTCYCSPGWKGARCDQAGVIIVGNLNSLSRTSTALPADSYQIGAIAGIIILVLVVLFLLALFIIYRHKQKGKESSMPAVTYTPAMRVVNADYTISGTLPHSNGGNANSHYFTNPSYHTLTQCATSPHVNNRDRMTVTKSKNNQLFVNLKNVNPGKRGPVGDCTGTLPADWKHGGYLNELGAFGLDRSYMGKSLKDLGKNSEYNSSNCSLSSSENPYATIKDPPVLIPKSSECGYVEMKSPARRDSPYAEINNSTSANRNVYEVEPTVSVVQGVFSNNGRLSQDPYDLPKNSHIPCHYDLLPVRDSSSSPKQEDSGGSSSNSSSSSE

SEQ ID NO: 115 - DNA, 1761 bp, Homo sapiens
  CDS (1)...(1761)
atggttatttctttgaactcatgcctgagctttatttgtttattgttatgccactggattgggacagcatcacctctgaatcttgaagaccctaatgtgtgtagccactgggaaagctactcagtgactgtgcaagagtcatacccacatccctttgatcaaatttactacacgagctgcactgacattctaaactggtttaaatgcacgcggcacagagtcagctatcggacagcctatcgacatggggagaagactatgtataggcgcaagtctcagtgttgtcctggattttatgaaagcggggaaatgtgtgtcccccactgtgctgataaatgtgtccatggtcgctgtattgctccaaacacctgtcagtgtgagcctggctggggagggaccaactgctccagtgcctgcgatggtgatcactggggtccccactgcaccagccggtgccagtgcaaaaatggggctctgtgcaaccccatcaccggggcttgccactgtgctgcgggcttccggggctggcgctgcgaggaccgctgtgagcagggcacctatggtaacgactgtcatcagagatgccagtgccagaatggagccacctgcgaccacgtcacgggggaatgccgctgcccaccaggatacaccggagccttctgtgaggatctttgtcctcctggtaaacatggtccacagtgtgagcagagatgcccttgtcaaaatggaggagtgtgtcatcacgtcactggagaatgctcttgcccttctggctggatgggcacagtgtgtggtcagccttgccccgagggtcgctttggaaagaactgttcccaagaatgccagtgccataatggagggacgtgtgatgctgccacaggccaatgtcattgcagtccaggatacacaggggaacggtgccaggatgagtgtcctgttgggacctatggcgttctctgtgctgagacctgccagtgtgtcaacggagggaagtgttaccacgtgagcggcgcatgcctctgtgaagcaggctttgctggcgagcgctgcgaagcacgcctgtgtcctgaggggctctacggcatcaaatgtgacaaacggtgtccctgccacttggaaaacactcatagctgtcaccccatgtctggagagtgtgcctgcaagccgggctggtcaggactctactgtaatgagacatgttctcctggattctacggggaagcttgccagcagatctgcagctgccaaaatggggcagactgtgacagtgtgactggaaagtgcacctgtgccccaggattcaaaggaattgactgctctaccccatgccctctgggaacctatgggataaactgttcctctcgctgtggctgtaaaaatgatgcagtctgctctcctgtggacgggtcttgtacttgcaaggcaggctggcacggggtggactgctccatcagatgtcccagtggcacatggggctttggctgtaacttaacatgccagtgcctcaacgggggagcctgcaacaccctggacgggacctgcacgtgtgcacctggatggcgcggggagaaatgcgaacttccctgccaggatggcacgtacgggctgaactgtgctgagcgctgcgactgcagccacgcagatggctgccaccctaccacgggccattgccgctgcctcccgggatggtcaggtgtccactgtgacagcgtgtgtgctgagggacgctggggccccaactgctccctgccctgctactga

SEQ ID NO: 116 - protein, 586 aa, Homo sapiens
MVISLNSCLSFICLLLCHWIGTASPLNLEDPNVCSHWESYSVTVQESYPHPFDQIYYTSCTDILNWFKCTRHRVSYRTAYRHGEKTMYRRKSQCCPGFYESGEMCVPHCADKCVHGRCIAPNTCQCEPGWGGTNCSSACDGDHWGPHCTSRCQCKNGALCNPITGACHCAAGFRGWRCEDRCEQGTYGNDCHQRCQCQNGATCDHVTGECRCPPGYTGAFCEDLCPPGKHGPQCEQRCPCQNGGVCHHVTGECSCPSGWMGTVCGQPCPEGRFGKNCSQECQCHNGGTCDAATGQCHCSPGYTGERCQDECPVGTYGVLCAETCQCVNGGKCYHVSGACLCEAGFAGERCEARLCPEGLYGIKCDKRCPCHLENTHSCHPMSGECACKPGWSGLYCNETCSPGFYGEACQQICSCQNGADCDSVTGKCTCAPGFKGIDCSTPCPLGTYGINCSSRCGCKNDAVCSPVDGSCTCKAGWHGVDCSIRCPSGTWGFGCNLTCQCLNGGACNTLDGTCTCAPGWRGEKCELPCQDGTYGLNCAERCDCSHADGCHPTTGHCRCLPGWSGVHCDSVCAEGRWGPNCSLPCY

SEQ ID NO: 117 - DNA, 3858 bp, Homo sapiens
  CDS (1)...(3858)
atggcgctggccaggcctgggaccccggacccccaggccctggcctctgtcctgctactgctgctctgggcccctgccctttccctcctggctgggacggtgccttcagagccccccagtgcctgtgcctcagacccgtgcgctccagggaccgagtgccaggctaccgagagtggtggctatacctgtgggcccatggagccccggggctgtgccacccagccatgccaccacggcgctctgtgtgtgccccagggtccagatcccaacggcttccgctgctactgcgtgccgggtttccagggcccacgctgcgagctggacatcgatgagtgtgcatcccggccgtgccaccatggggccacctgccgcaacctggccgatcgctacgagtgccattgcccccttggctatgcaggcgtgacctgcgagatggaggtggacgagtgcgcctcagcgccctgcctgcacgggggctcgtgcctggacggcgtgggctccttccgctgtgtgtgcgcgccaggctacgggggcacccgttgccagctggacctcgacgagtgccagagccagccgtgcgcacatgggggcacgtgccacgacctggtcaacgggttccggtgcgactgcgcgggcaccggctacgagggcacgcactgcgagcgggaggtgctggagtgcgcatcggcgccctgcgagcacaacgcgtcctgcctcgagggcctcgggagcttccgctgcctctgttggccaggctacagcggcgagctgtgcgaggtggacgaggacgagtgtgcatcgagcccctgccagcatgggggccgatgcctgcagcgctctgacccggccctctacgggggtgtccaggccgccttccctggcgccttcagcttccgccatgctgcgggtttcctgtgccactgccctcctggctttgagggagccgactgcggtgtggaggtggacgagtgtgcctcacggccatgcctcaacggaggccactgccaggacctgcccaatggcttccagtgtcactgcccagatggctacgcagggccgacatgtgaggaagatgtggatgaatgcctgtcggatccctgcctgcacggcggaacctgcagtgacactgtggcaggctatatctgcaggtgcccagagacctggggtgggcgcgactgttctgtgcagctcactggctgccagggccacacctgcccgctggctgccacctgcatccctatcttcgagtctggggtccacagttacgtctgccactgcccacctggtacccatggaccgttctgtggccagaataccaccttctctgtgatggctgggagccccattcaggcatcagtgccagctggtggccccctgggtctggcactgaggtttcgcaccacactgcccgctgggaccttggccactcgcaatgacaccaaggaaagcttggagctggcattggtggcagccacacttcaggccacactctggagctacagcaccactgtgcttgtcctgagactgccggacctggccctaaacgatggccattggcaccaggtggaggttgtgctccatctagcgaccctggagctacggctctggcatgagggctgccctgcccggctctgtgtggcctctggtcctgtggccctggcttccacggcttcggcaactccgctgcctgccgggatctcctctgcccagctgggggacgcgacctttgcaggctgcctccaggacgtgcgtgtggatggccacctcctgctgcctgaggatctcggtgagaacgtcctcctgggctgtgagcgccgagagcagtgccggcctctgccttgtgtccacggagggtcctgtgtggatctgtggactcatttccgttgcgactgtgcccggccccatagaggtcccacgtgcgctgatgagattcctgctgccacctttggcttgggaggcgccccaagctctgcctcctttctgctccaagagctgccaggtcccaacctcacagtgtctttccttctccgcactcgggagtccgctggcctgttgctccagtttgccaatgactccgcagctggcctaacagtattcctgagtgagggtcggatccgggctgaggcgccgggcagtcctgctgtagtgctccctgggcgctgggatgatgggctccgtcacctggtgatgctcagcttcgggcctgaccagctgcaggacctggggcagcacgtgcacgtgggtgggaggctccttgctgccgacagccagccctggggtgggcccttccgaggctgcctccaggacctgcgactcgatggctgccacctccccttctttcctctgccactggataactcaagccagcccagcgagctcggcggcaggcagtcctggaacctcactgcgggctgcgtctccgaggacatgtgcagtcctgacccctgtttcaatggtgggacttgcctcgtcacctggaatgacttccactgtacctgccctgccaatttcacggggcctacgtgtgcccagcagctgtggtgtcccggccagccctgtctcccacctgccacgtgtgaggaggtccctgatggctttgtgtgtgtggcggaggccacgttccgcgagggtccccccgccgcgttcagcgggcacaacgcgtcgtcagggcgcttgctcggcggcctgtcgctggcctttcgcacgcgcgactccgaggcctggctgctgcgtgccgcggcgggcgccctggaaggcgtgtggctggcggtgcgcaatggctcgctggcggggggcgtgcgcggaggccatggcctgcccggcgctgtgctgcccataccggggccgcgcgtggccgatggtgcctggcaccgcgtgcgtctggccatggagcgcccggcggccgccacctcgcgctggctgctgtggctggatggtgccgccaccccggtggcgctgcgcggcctggccagtgacctgggcttcctgcagggcccgggtgctgtgcgcatcctgctggctgagaacttcaccggctgcttgggccgcgtggcgctgggcggcctgcccctgcccttggcgcggccccggcccggcgcggcccctggcgcccgagagcacttcgcgtcttggcctgggacgccggccccgatcctcggctgccgcggcgcgcccgtgtgtgcgccctcgccctgtctgcacgacggtgcctgccgtgacctcttcgacgcctttgcctgcgcctgcggcccggggtgggaaggcccgcgctgcgaagcccacgtcgacccctgtcactccgccccctgcgcccgtggccgctgtcacatgcaccccgacggccgcttcgagtgccgctgcccgcctggcttcgggggcccgcgctgcaggttgcctgtcccatccaaggagtgcagcctgaatgtcacctgcctcgatggcagcccatgtgagggtggctctcccgctgccaactgcagctgcctggagggtcttgctggccagaggtgtcaggtccccactctcccctgtgaagccaacccctgcttgaatgggggcacctgccgggcagctggaggggtgtctgaatgtatctgcaatgccagattctccggccagttctgtgaagtggcgaagggcctgcccctgccgctgccattcccactgctggaggtggccgtacctgcagcctgtgcctgcctcctcctcctcctcctgggcctcctttcagggatcctggcagcccgaaagcgccgccagtctgagggcacctacagcccaagccagcaggaggtggctggggcccggctggagatggacagtgtcctcaaggtgccaccggaggagagactcatctag

SEQ ID NO: 118 - protein, 1285 aa, Homo sapiens
MALARPGTPDPQALASVLLLLLWAPALSLLAGTVPSEPPSACASDPCAPGTECQATESGGYTCGPMEPRGCATQPCHHGALCVPQGPDPNGFRCYCVPGFQGPRCELDIDECASRPCHHGATCRNLADRYECHCPLGYAGVTCEMEVDECASAPCLHGGSCLDGVGSFRCVCAPGYGGTRCQLDLDECQSQPCAHGGTCHDLVNGFRCDCAGTGYEGTHCEREVLECASAPCEHNASCLEGLGSFRCLCWPGYSGELCEVDEDECASSPCQHGGRCLQRSDPALYGGVQAAFPGAFSFRHAAGFLCHCPPGFEGADCGVEVDECASRPCLNGGHCQDLPNGFQCHCPDGYAGPTCEEDVDECLSDPCLHGGTCSDTVAGYICRCPETWGGRDCSVQLTGCQGHTCPLAATCIPIFESGVHSYVCHCPPGTHGPFCGQNTTFSVMAGSPIQASVPAGGPLGLALRFRTTLPAGTLATRNDTKESLELALVAATLQATLWSYSTTVLVLRLPDLALNDGHWHQVEVVLHLATLELRLWHEGCPARLCVASGPVALASTASATPLPAGISSAQLGDATFAGCLQDVRVDGHLLLPEDLGENVLLGCERREQCRPLPCVHGGSCVDLWTHFRCDCARPHRGPTCADEIPAATFGLGGAPSSASFLLQELPGPNLTVSFLLRTRESAGLLLQFANDSAAGLTVFLSEGRIRAEAPGSPAVVLPGRWDDGLRHLVMLSFGPDQLQDLGQHVHVGGRLLAADSQPWGGPFRGCLQDLRLDGCHLPFFPLPLDNSSQPSELGGRQSWNLTAGCVSEDMCSPDPCFNGGTCLVTWNDFHCTCPANFTGPTCAQQLWCPGQPCLPPATCEEVPDGFVCVAEATFREGPPAAFSGHNASSGRLLGGLSLAFRTRDSEAWLLRAAAGALEGVWLAVRNGSLAGGVRGGHGLPGAVLPIPGPRVADGAWHRVRLAMERPAAATSRWLLWLDGAATPVALRGLASDLGFLQGPGAVRILLAENFTGCLGRVALGGLPLPLARPRPGAAPGAREHFASWPGTPAPILGCRGAPVCAPSPCLHDGACRDLFDAFACACGPGWEGPRCEAHVDPCHSAPCARGRCHMHPDGRFECRCPPGFGGPRCRLPVPSKECSLNVTCLDGSPCEGGSPAANCSCLEGLAGQRCQVPTLPCEANPCLNGGTCRAAGGVSECICNARFSGQFCEVAKGLPLPLPFPLLEVAVPAACACLLLLLLGLLSGILAARKRRQSEGTYSPSQQEVAGARLEMDSVLKVPPEERLI

SEQ ID NO: 119 - DNA, 3039 bp, Homo sapiens
  CDS (1)...(3039)
atggagtcgctcctgctgccggtgctgctgctgctggccatactgtggacgcaggctgccgccctcattaatctcaagtactcggtagaagaggagcagcgcgccgggacggtgattgccaacgtggccaaagacgcgcgagaggcgggcttcgcgctggacccccggcaggcttcagcctttcgcgtggtgtccaactcggctccacacctagtggacatcaatcccagctctggcctgctggtcaccaagcagaagattgaccgtgatctgctgtgccgccagagccccaagtgcatcatctcgctcgaggtcatgtccagctcaatggaaatctgcgtgataaaggtggagatcaaggacctgaacgacaatgcgcccagtttcccggcagcacagatcgagctggagatctcggaggcagccagccctggcacgcgcatcccgctggacagcgcttacgatccagactcaggaagctttggcgtgcagacttacgagctcacgcccaacgagctgttcggcctggagatcaagacgcgcggcgacggctcccgctttgccgaactcgtggtggaaaagagcctggaccgcgagacgcagtcgcactacagcttccgaatcactgcgctagacggtggcgacccgccgcgcctgggcaccgttggccttagtatcaaggtgaccgactccaatgacaacaacccggtgtttagcgagtccacctacgcggtgagcgtgccagaaaactcgcctcccaacacacccgtcatccgcctcaacgccagcgatccagacgagggcaccaacggccaggtggtctactccttctatggctacgtcaacgaccgcacgcgcgagctctttcagatcgacccgcacagtggcctggtcactgtcactggcgctttagactacgaagaggggcacgtgtacgaactggacgtgcaggctaaggacttggggcccaattccatcccggcacactgcaaggtcaccgtcagcgtgctggacaccaatgacaatccgccggtcatcaacctgctgtcagtcaacagtgagcttgtggaggtcagcgagagcgcccccccgggctacgtgatcgccttggtgcgggtgtctgatcgcgactcaggcctcaatggacgtgtgcagtgccgtttgctgggcaatgtgccctttcgactgcaggaatatgagagcttctccactattctggtggacggacggctggaccgcgagcagcacgaccaatacaacctcacaattcaggcacgcgacggcggcgtgcccatgctgcagagtgccaagtcctttaccgtgctcatcactgacgaaaatgacaaccacccgcacttttccaagccctactaccaggtcattgtgcaggagaacaacacgcctggcgcctatctgctctctgtgtctgctcgcgaccccgacctgggtctcaacggcagtgtctcctaccagatcgtgccgtcgcaggtgcgggacatgcctgtcttcacctatgtctccatcaatcccaactcaggcgacatctacgcgctgcgatcctttaaccacgagcagaccaaggcgttcgaattcaaggtgctggccaaggacggcggccttccctcactgcaaagcaacgctacggtgcgggtcatcatcctcgacgtcaacgacaacaccccggtcatcacagccccacctctgattaacggcactgccgaggtctacataccccgcaactctggcataggctacctggtgactgttgtcaaggcagaagactacgatgagggcgaaaatggccgagtcacctacgacatgaccgagggcgaccgcggcttctttgaaatagaccaggtcaatggcgaagtcagaaccacccgcaccttcggggagagctccaagtcctcctatgagcttatcgtggtggctcacgaccacggcaagacatctctctctgcctctgctctcgtcctaatctacttgtcccctgctctcgatgcccaagagtcaatgggctctgtgaacttgtccttgattttcattattgccctgggctccattgcgggcatcctctttgtaactatgatcttcgtggcaatcaagtgcaagcgagacaacaaagagatccggacctacaactgcagaattgctgagtactcctatgggcatcaaaagaaatcaagcaagaagaaaaaaatcagtaagaatgacatccgcctggtaccccgggatgtggaggagacagacaagatgaacgttgtcagttgctcttccctgacctcctccctcaactattttgactaccaccagcagacgctgcccctgggctgccgccgctctgagagcactttcctgaatgtggagaaccagaatacccgcaacaccagtgctaaccacatctaccatcactctttcaacagccaggggccccagcagcctgacctgattatcaacggtgtgcctctgcctgagactgaaaactattcttttgactccaactacgtgaatagccgagcccatttaatcaagagcagctccaccttcaaggacttagagggcaacagcctgaaggatagtggacatgaggagagtgaccaaactgacagtgagcatgatgtccagcggagcctgtattgtgatactgctgtcaacgatgtgctgaacaccagtgtgacctccatgggatctcagatgcctgatcatgatcagaatgaaggatttcattgccgggaagaatgccggattcttggccactctgacaggtgctggatgccccggaaccccatgcccatccgttccaagtcccctgagcatgtgaggaacatcatcgcgctgtctattgaagctactgctgctgatgtcgaggcttatgacgactgcggccccaccaaacggactttcgcaacctttgggaaagatgtcagcgaccacccggctgaggagaggcctaccctgaaaggcaagaggactgtcgatgtgaccatctgcagccccaaggtcaacaagcgttatccgggaggcaggcaatggctgtga

SEQ ID NO: 120 - protein, 1012 aa, Homo sapiens
MESLLLPVLLLLAILWTQAAALINLKYSVEEEQRAGTVIANVAKDAREAGFALDPRQASAFRVVSNSAPHLVDINPSSGLLVTKQKIDRDLLCRQSPKCIISLEVMSSSMEICVIKVEIKDLNDNAPSFPAAQIELEISEAASPGTRIPLDSAYDPDSGSFGVQTYELTPNELFGLEIKTRGDGSRFAELVVEKSLDRETQSHYSFRITALDGGDPPRLGTVGLSIKVTDSNDNNPVFSESTYAVSVPENSPPNTPVIRLNASDPDEGTNGQVVYSFYGYVNDRTRELFQIDPHSGLVTVTGALDYEEGHVYELDVQAKDLGPNSIPAHCKVTVSVLDTNDNPPVINLLSVNSELVEVSESAPPGYVIALVRVSDRDSGLNGRVQCRLLGNVPFRLQEYESFSTILVDGRLDREQHDQYNLTIQARDGGVPMLQSAKSFTVLITDENDNHPHFSKPYYQVIVQENNTPGAYLLSVSARDPDLGLNGSVSYQIVPSQVRDMPVFTYVSINPNSGDIYALRSFNHEQTKAFEFKVLAKDGGLPSLQSNATVRVIILDVNDNTPVITAPPLINGTAEVYIPRNSGIGYLVTVVKAEDYDEGENGRVTYDMTEGDRGFFEIDQVNGEVRTTRTFGESSKSSYELIVVAHDHGKTSLSASALVLIYLSPALDAQESMGSVNLSLIFIIALGSIAGILFVTMIFVAIKCKRDNKEIRTYNCRIAEYSYGHQKKSSKKKKISKNDIRLVPRDVEETDKMNVVSCSSLTSSLNYFDYHQQTLPLGCRRSESTFLNVENQNTRNTSANHIYHHSFNSQGPQQPDLIINGVPLPETENYSFDSNYVNSRAHLIKSSSTFKDLEGNSLKDSGHEESDQTDSEHDVQRSLYCDTAVNDVLNTSVTSMGSQMPDHDQNEGFHCREECRILGHSDRCWMPRNPMPIRSKSPEHVRNIIALSIEATAADVEAYDDCGPTKRTFATFGKDVSDHPAEERPTLKGKRTVDVTICSPKVNKRYPGGRQWL

SEQ ID NO: 121 - DNA, 3906 bp, Homo sapiens
ggaggaagggagcccaacgcagcgcggccagcgcctctccgggaagatgaaatcaagacgctcctgcaagtaaacttcggcggcgacaaaatcgtcgactgtggcagctgctgaggcggaccccagcgacgtgcaactgagctaggagggcttcctcccgcggcggcggcggcggcggcggcggcggcggaccttggagcgacaccccagcccaaacggagagaagagaagcacccggtacccacggcggcggccccgcctctcctggccggtactgttgttgcctccccttccctcttccccattccccgccacccccggccattagaaagaccggggctttgattttcttggacaaattgccatctccccgtttccacaaacttgacgtggagggtcggactgcgttgttaactttgatttcctagacgaaaacgcccgcagaccctcaactgctctgtggggggaactccgctcccacctcggatcctggacagacgcgcccccaagcccttcgaagccagccttagcgcgagggagcgcgctcaagctctggcagcctctctcccctcccccttcctctgctggccccgggaccgccatccgactcaaccctataaccgggtgtcccccgcgcgccgccgggccgccctgggcgggacttctcccgcggcctccggggccacggggcgcgcgcaacaggcggcccgagccggcgggaagctggagcgccgacggcgtcggtctcggaggggtgtggagaggcgaggccaggcagagccccgtgcagccatggagtcgctcctgctgccggtgctgctgctgctggccatactgtggacgcaggctgccgccctcattaatctcaagtactcggtagaagaggagcagcgcgccgggacggtgattgccaacgtggccaaagacgcgcgagaggcgggcttcgcgctggacccccggcaggcttcagcctttcgcgtggtgtccaactcggctccacacctagtggacatcaatcccagctctggcctgctggtcaccaagcagaagattgaccgtgatctgctgtgccgccagagccccaagtgcatcatctcgctcgaggtcatgtccagctcaatggaaatctgcgtgataaaggtggagatcaaggacctgaacgacaatgcgcccagtttcccggcagcacagatcgagctggagatctcggaggcagccagccctggcacgcgcatcccgctggacagcgcttacgatccagactcaggaagctttggcgtgcagacttacgagctcacgcccaacgagctgttcggcctggagatcaagacgcgcggcgacggctcccgctttgccgaactcgtggtggaaaagagcctggaccgcgagacgcagtcgcactacagcttccgaatcactgcgctagacggtggcgacccgccgcgcctgggcaccgttggccttagtatcaaggtgaccgactccaatgacaacaacccggtgtttagcgagtccacctacgcggtgagcgtgccagaaaactcgcctcccaacacacccgtcatccgcctcaacgccagcgatccagacgagggcaccaacggccaggtggtctactccttctatggctacgtcaacgaccgcacgcgcgagctctttcagatcgacccgcacagtggcctggtcactgtcactggcgctttagactacgaagaggggcacgtgtacgaactggacgtgcaggctaaggacttggggcccaattccatcccggcacactgcaaggtcaccgtcagcgtgctggacaccaatgacaatccgccggtcatcaacctgctgtcagtcaacagtgagcttgtggaggtcagcgagagcgcccccccgggctacgtgatcgccttggtgcgggtgtctgatcgcgactcaggcctcaatggacgtgtgcagtgccgtttgctgggcaatgtgccctttcgactgcaggaatatgagagcttctccactattctggtggacggacggctggaccgcgagcagcacgaccaatacaacctcacaattcaggcacgcgacggcggcgtgcccatgctgcagagtgccaagtcctttaccgtgctcatcactgacgaaaatgacaaccacccgcacttttccaagccctactaccaggtcattgtgcaggagaacaacacgcctggcgcctatctgctctctgtgtctgctcgcgaccccgacctgggtctcaacggcagtgtctcctaccagatcgtgccgtcgcaggtgcgggacatgcctgtcttcacctatgtctccatcaatcccaactcaggcgacatctacgcgctgcgatcctttaaccacgagcagaccaaggcgttcgaattcaaggtgctggccaaggacggcggccttccctcactgcaaagcaacgctacggtgcgggtcatcatcctcgacgtcaacgacaacaccccggtcatcacagccccacctctgattaacggcactgccgaggtctacataccccgcaactctggcataggctacctggtgactgttgtcaaggcagaagactacgatgagggcgaaaatggccgagtcacctacgacatgaccgagggcgaccgcggcttctttgaaatagaccaggtcaatggcgaagtcagaaccacccgcaccttcggggagagctccaagtcctcctatgagcttatcgtggtggctcacgaccacggcaagacatctctctctgcctctgctctcgtcctaatctacttgtcccctgctctcgatgcccaagagtcaatgggctctgtgaacttgtccttgattttcattattgccctgggctccattgcgggcatcctctttgtaactatgatcttcgtggcaatcaagtgcaagcgagacaacaaagagatccggacctacaactgcagaattgctgagtactcctatgggcatcaaaagaaatcaagcaagaagaaaaaaatcagtaagaatgacatccgcctggtaccccgggatgtggaggagacagacaagatgaacgttgtcagttgctcttccctgacctcctccctcaactattttgactaccaccagcagacgctgcccctgggctgccgccgctctgagagcactttcctgaatgtggagaaccagaatacccgcaacaccagtgctaaccacatctaccatcactctttcaacagccaggggccccagcagcctgacctgattatcaacggtgtgcctctgcctgagactgaaaactattcttttgactccaactacgtgaatagccgagcccatttaatcaagagcagctccaccttcaaggacttagagggcaacagcctgaaggatagtggacatgaggagagtgaccaaactgacagtgagcatgatgtccagcggagcctgtattgtgatactgctgtcaacgatgtgctgaacaccagtgtgacctccatgggatctcagatgcctgatcatgatcagaatgaaggatttcattgccgggaagaatgccggattcttggccactctgacaggtgctggatgccccggaaccccatgcccatccgttccaagtcccctgagcatgtgaggaacatcatcgcgctgtctattgaagctactgctgctgatgtcgaggcttatgacgactgcggccccaccaaacggactttcgcaacctttgggaaagatgtcagcgaccacccggctgaggagaggcctaccctgaaaggcaagaggactgtcgatgtgaccatctgcagccccaaggtcaacaagcgttatccgggaggcaggcaatggctgtgaggcgattagccctgtcaccttcccccttcaccttaagagcttttttgcccaccaagcctttcgtgtcttacacca

SEQ ID NO: 122 - DNA, 2868 bp, Homo sapiens
  CDS (1)...(2868)
atggaggtgacctgccttctacttctggcgctgatccccttccactgccggggacaaggagtctacgctccagcccaggcgcagatcgtgcatgcgggccaggcatgtgtggtgaaagaggacaatatcagcgagcgtgtctacaccatccgggagggggacaccctcatgctgcagtgccttgtaacagggcaccctcgaccccaggtacggtggaccaagacggcaggtagcgcctcggacaagttccaggagacatcggtgttcaacgagacgctgcgcatcgagcgtattgcacgcacgcagggcggccgctactactgcaaggctgagaacggcgtgggggtgccggccatcaagtccatccgcgtggacgtgcagtacctggatgagccaatgctgacggtgcaccagacggtgagcgatgtgcgaggcaacttctaccaggagaagacggtgttcctgcgctgtactgtcaactccaacccrcctgcccgcttcatctggaagcggggttccgataccctatcccacagccaggacaatggggttgacatctatgagcccctctacactcagggggagaccaaggtcctgaagctgaagaacctgcggccccaggactatgccagctacacctgccaggtgtctgtgcgtaacgtgtgcggcatcccagacaaggccatcaccttccggctcaccaacaccacggcaccaccagccctgaagctgtctgtgaacgaaactctggtggtgaaccctggggagaatgtgacggtgcagtgtctgctgacaggcggtgatcccctcccccagctgcagtggtcccatgggcctggcccactgcccctgggtgctctggcccagggtggcaccctcagcatcccttcagtgcaggcccgggactctggctactacaactgcacagccaccaacaatgtgggcaaccctgccaagaagactgtcaacctgctggtgcgatccatgaagaacgctacattccagatcactcctgacgtgatcaaagagagtgagaacatccagctgggccaggacctgaagctatcgtgccacgtggatgcagtgccccaggagaaggtgacctaccagtggttcaagaatggcaagccggcacgcatgtccaagcggctgctggtgacccgcaatgatcctgagctgcccgcagtcaccagcagcctagagctcattgacctgcacttcagtgactatggcacctacctgtgcatggcttctttcccaggggcacccgtgcccgacctcagcgtcgaggtcaacatctcctctgagacagtgccgcccaccatcagtgtgcccaagggtagggccgtggtgaccgtgcgcgagggatcgcctgccgagctgcaatgcgaggtgcggggcaagccgcggccgccagtgctctggtcccgcgtggacaaggaggctgcactgctgccctcggggctgcccctggaggagactccggacgggaagctscggctggagcgagtgagccgagacatgagcgggacctaccgctgccagacggcccgctataatggcttcaacgtgcgcccccgtgaggcccaggtgcagctgaacgtgcagttcccgccggaggtggagcccagttcccaggacgtgcgccaggcgctgggccggcccgtgctcctgcgctgctcgctgctgcgaggcagcccccagcgcatcgcctcggctgtgtggcgtttcaaagggcagctgctgccgccgccgcctgttgttcccgccgccgccgaggcgccggatcacgcggagctgcgcctcgacgccgtaactcgcgacagcagcggcagctacgagtgcagcgtctccaacgatgtgggctcggctgcctgcctcttccaggtctccgccaaagcctacagcccggagttttacttcgacacccccaaccccacccgcagccacaagctgtccaagaactactcctacgtgctgcagtggactcagagggagcccgacgctgtcgaccctgtgctcaactacagactcagcatccgccagttgaaccagcacaatgcggtggtcaaggccatcccggtccggcgtgtggagaaggggcagctgctggagtacatcctgaccgatctccgtgtgccccacagctatgaggtccgcctcacaccctataccaccttcggggctggtgacatggcctcccgcatcatccactacacagagcccatcaactctccgaacctttcagacaacacctgccactttgaggatgagaagatctgtggctatacccaggacctgacagacaactttgactggacgcggcagaatgccctcacccagaaccccaaacgctcccccaacactggtccccccaccgacataagtggcacccctgagggctactacatgttcatcgagacatcgaggcctcgggagctgggggaccgtgcaaggttagtgagtcccctctacaatgccagcgccaagttctactgtgtctccttcttctaccacatgtacgggaaacacatcggctccctcaacctcctggtgcggtcccggaacaaaggggctctggacacgcacgcctggtctctcagtggcaataagggcaatgtgtggcagcaggcccatgtgcccatcagccccagtgggcccttccagattatttttgagggggttcgaggcccgggctacctgggggatattgccatagatgacgtcacactgaagaagggggagtgtccccggaagcagacggatcccaataaagtggtggtgatgccgggcagtggagccccctgccagtccagcccacagctgtgggggcccatggccatcttcctcttggcgttgcagagatga

SEQ ID NO: 123 - protein, 955 aa, Homo sapiens
  VARIANT (1)...(955): Xaa = Any Amino Acid
MEVTCLLLLALIPFHCRGQGVYAPAQAQIVHAGQACVVKEDNISERVYTIREGDTLMLQCLVTGHPRPQVRWTKTAGSASDKFQETSVFNETLRIERIARTQGGRYYCKAENGVGVPAIKSIRVDVQYLDEPMLTVHQTVSDVRGNFYQEKTVFLRCTVNSNXPARFIWKRGSDTLSHSQDNGVDIYEPLYTQGETKVLKLKNLRPQDYASYTCQVSVRNVCGIPDKAITFRLTNTTAPPALKLSVNETLVVNPGENVTVQCLLTGGDPLPQLQWSHGPGPLPLGALAQGGTLSIPSVQARDSGYYNCTATNNVGNPAKKTVNLLVRSMKNATFQITPDVIKESENIQLGQDLKLSCHVDAVPQEKVTYQWFKNGKPARMSKRLLVTRNDPELPAVTSSLELIDLHFSDYGTYLCMASFPGAPVPDLSVEVNISSETVPPTISVPKGRAVVTVREGSPAELQCEVRGKPRPPVLWSRVDKEAALLPSGLPLEETPDGKXRLERVSRDMSGTYRCQTARYNGFNVRPREAQVQLNVQFPPEVEPSSQDVRQALGRPVLLRCSLLRGSPQRIASAVWRFKGQLLPPPPVVPAAAEAPDHAELRLDAVTRDSSGSYECSVSNDVGSAACLFQVSAKAYSPEFYFDTPNPTRSHKLSKNYSYVLQWTQREPDAVDPVLNYRLSIRQLNQHNAVVKAIPVRRVEKGQLLEYILTDLRVPHSYEVRLTPYTTFGAGDMASRIIHYTEPINSPNLSDNTCHFEDEKICGYTQDLTDNFDWTRQNALTQNPKRSPNTGPPTDISGTPEGYYMFIETSRPRELGDRARLVSPLYNASAKFYCVSFFYHMYGKHIGSLNLLVRSRNKGALDTHAWSLSGNKGNVWQQAHVPISPSGPFQIIFEGVRGPGYLGDIAIDDVTLKKGECPRKQTDPNKVVVMPGSGAPCQSSPQLWGPMAIFLLALQR

SEQ ID NO: 124 - DNA, 1347 bp, Homo sapiens
  CDS (1)...(1347)
atgagcgggacctaccgctgccagacggcccgctataatggcttcaacgtgcgcccccgtgaggcccaggtgcagctgaacgtgcagttcccgccggaggtggagcccagttcccaggacgtgcgccaggcgctgggccggcccgtgctcctgcgctgctcgctgctgcgaggcagcccccagcgcatcgcctcggctgtgtggcgtttcaaagggcagctgctgccgccgccgcctgttgttcccgccgccgccgaggcgccggatcacgcggagctgcgcctcgacgccgtaactcgcgacagcagcggcagctacgagtgcagcgtctccaacgatgtgggctcggctgcctgcctcttccaggtctccgccaaagcctacagcccggagttttacttcgacacccccaaccccacccgcagccacaagctgtccaagaactactcctacgtgctgcagtggactcagagggagcccgacgctgtcgaccctgtgctcaactacagactcagcatccgccagttgaaccagcacaatgcggtggtcaaggccatcccggtccggcgtgtggagaaggggcagctgctggagtacatcctgaccgatctccgtgtgccccacagctatgaggtccgcctcacaccctataccaccttcggggctggtgacatggcctcccgcatcatccactacacagagcccatcaactctccgaacctttcagacaacacctgccactttgaggatgagaagatctgtggctatacccaggacctgacagacaactttgactggacgcggcagaatgccctcacccagaaccccaaacgctcccccaacactggtccccccaccgacataagtggcacccctgagggctactacatgttcatcgagacatcgaggcctcgggagctgggggaccgtgcaaggttagtgagtcccctctacaatgccagcgccaagttctactgtgtctccttcttctaccacatgtacgggaaacacatcggctccctcaacctcctggtgcggtcccggaacaaaggggctctggacacgcacgcctggtctctcagtggcaataagggcaatgtgtggcagcaggcccatgtgcccatcagccccagtgggcccttccagattatttttgagggggttcgaggcccgggctacctgggggatattgccatagatgacgtcacactgaagaagggggagtgtccccggaagcagacggatcccaataaagtggtggtgatgccgggcagtggagccccctgccagtccagcccacagctgtgggggcccatggccatcttcctcttggcgttgcagagatga

SEQ ID NO: 125 - protein, 448 aa, Homo sapiens
MSGTYRCQTARYNGFNVRPREAQVQLNVQFPPEVEPSSQDVRQALGRPVLLRCSLLRGSPQRIASAVWRFKGQLLPPPPVVPAAAEAPDHAELRLDAVTRDSSGSYECSVSNDVGSAACLFQVSAKAYSPEFYFDTPNPTRSHKLSKNYSYVLQWTQREPDAVDPVLNYRLSIRQLNQHNAVVKAIPVRRVEKGQLLEYILTDLRVPHSYEVRLTPYTTFGAGDMASRIIHYTEPINSPNLSDNTCHFEDEKICGYTQDLTDNFDWTRQNALTQNPKRSPNTGPPTDISGTPEGYYMFIETSRPRELGDRARLVSPLYNASAKFYCVSFFYHMYGKHIGSLNLLVRSRNKGALDTHAWSLSGNKGNVWQQAHVPISPSGPFQIIFEGVRGPGYLGDIAIDDVTLKKGECPRKQTDPNKVVVMPGSGAPCQSSPQLWGPMAIFLLALQR

SEQ ID NO: 126 - DNA, 2445 bp, Homo sapiens
  CDS (1)...(2445)
atggctgtgcagcgcgccgcgtctccgcgccgcccgcccgccccgctctggccccggctcctgctgccgctgctgttgctgctgctgcccgcgccgagcgagggtcttggccactctgctgaactggcatttgctgtggagccaagtgatgatgttgccgtccccgggcagcctatagtgctggactgcagggtggaggggacccctccagtgcgaatcacctggaggaagaatggggtagagctgccagagagtacccactccaccttgctggccaatgggtccttgatgatccgtcacttcaggctggagccgggaggcagcccttcggatgaaggtgactatgagtgtgtggcccagaaccgctttgggctggtggtcagccggaaggctcgcatccaagctgcaaccatgtcggacttccacgtgcatccccaggccaccgtgggtgaggagggtggtgtggcccgcttccagtgccaaatccatgggcttcccaaacccctgatcacttgggagaagaacagagtcccaattgacacggacaatgagaggtacacattgctgcccaagggggtcctgcagatcacaggacttcgagctgaggacggtggcatcttccactgtgtggcctcaaacatcgccagtatccggatcagccacggggccaggctcactgtgtcaggctcgggctctggggcctacaaggagccagccatcctcgtggggcctgagaacctcaccctgacagtgcaccagaccgcggtgcttgagtgtgtcgccacgggcaacccgcgccccattgtgtcctggagccgcctggatggtcgccctatcggggtggagggcatccaggtgctgggcacaggaaacctcatcatctcagacgtgacggtccagcactctggcgtctacgtctgtgcagccaacagacctggcacccgggtgaggagaacggcacagggccggctggtggtgcaagccccagctgagtttgtgcagcatccccagtccatctccaggccagctgggaccacagccatgttcacctgccaagcccagggtgagccaccgcctcatgtcacgtggctgaaaaatggacaggtgctggggccaggaggccacgtcaggctcaagaataacaacagcacactgaccatttctggaatcggtcctgaggatgaagccatttatcagtgtgtggccgagaacagtgcgggctcatcacaggccagtgccaggctgaccgtactgtgggctgaggggctccccgggcctccccgcaatgtgcgggcagtctctgtgtcttccactgaggtgcgtgtgtcctggagtgagccgctggccaacaccaaggagatcatcggctacgtcctgcacatcaggaaggctgctgacccaccggagctggagtatcaggaggcagtcagcaagagcacctttcagcacctggtcagcgacctggagccctccacagcctacagtttctacatcaaggcctacacaccaaggggggccagctcagcctctgtgcccaccctagctagcaccctgggtgaagcccctgccccacccccactgtcagtgcgagtcctgggcagctcctccttgcagctgctgtgggagccttggccccggctggcccagcacgagggcggcttcaagctgttttaccgcccagcaagcaagacctccttcaccggccccatcctgctgcctggaaccgtctcctcctacaacctcagccagctcgaccccactgcagtgtatgaggtgaagctgctcgcctacaaccagcatggagatggcaatgccacagtccgctttgtgtctttgaggggagcatctgagaggacagccttgagcccaccatgtgactgccggaaggaggaggccgccaaccagacgtccaccacaggcatcgtcatcggcatccacatcggggtcacttgcatcatcttctgtgtcctcttcctcctgttcggccaaaggggcagggtcctcctgtgtaaagatgtggaaaaccagctgtcccctccacagggtccccggagccagagggaccctggcattctggccctaaatggggcgagacggggacagcggggccagctgggccgagacgagaaacgtgtggatatgaaggagctggagcagctgttccccccggccagcgcagcagggcagccggaccccagacccacacaggatcctgcagcccccgctccgtgtgaggagacccagctctccgtgctgccacttcaggggtgcggcctgatggaggggaagacgacggaggcgaagaccacagaggccacggctccctgcgccggcctggcggctgccccaccacccccagatggaggacctggcctcctcagtgaaggccaggcttccaggcctgcagcggcccgggttacccagccagctcactcggaacagtag

SEQ ID NO: 127 - protein, 814 aa, Homo sapiens
MAVQRAASPRRPPAPLWPRLLLPLLLLLLPAPSEGLGHSAELAFAVEPSDDVAVPGQPIVLDCRVEGTPPVRITWRKNGVELPESTHSTLLANGSLMIRHFRLEPGGSPSDEGDYECVAQNRFGLVVSRKARIQAATMSDFHVHPQATVGEEGGVARFQCQIHGLPKPLITWEKNRVPIDTDNERYTLLPKGVLQITGLRAEDGGIFHCVASNIASIRISHGARLTVSGSGSGAYKEPAILVGPENLTLTVHQTAVLECVATGNPRPIVSWSRLDGRPIGVEGIQVLGTGNLIISDVTVQHSGVYVCAANRPGTRVRRTAQGRLVVQAPAEFVQHPQSISRPAGTTAMFTCQAQGEPPPHVTWLKNGQVLGPGGHVRLKNNNSTLTISGIGPEDEAIYQCVAENSAGSSQASARLTVLWAEGLPGPPRNVRAVSVSSTEVRVSWSEPLANTKEIIGYVLHIRKAADPPELEYQEAVSKSTFQHLVSDLEPSTAYSFYIKAYTPRGASSASVPTLASTLGEAPAPPPLSVRVLGSSSLQLLWEPWPRLAQHEGGFKLFYRPASKTSFTGPILLPGTVSSYNLSQLDPTAVYEVKLLAYNQHGDGNATVRFVSLRGASERTALSPPCDCRKEEAANQTSTTGIVIGIHIGVTCIIFCVLFLLFGQRGRVLLCKDVENQLSPPQGPRSQRDPGILALNGARRGQRGQLGRDEKRVDMKELEQLFPPASAAGQPDPRPTQDPAAPAPCEETQLSVLPLQGCGLMEGKTTEAKTTEATAPCAGLAAAPPPPDGGPGLLSEGQASRPAAARVTQPAHSEQ

SEQ ID NO: 128 - DNA, 7872 bp, Homo sapiens
  CDS (1)...(7872)
atgaaggtaaaaggcagaggaatcacctgcttgctggtctcctttgctgtgatctgcctggtcgccacccctgggggcaaggcctgtcctcgccgctgtgcctgttatatgcctacggaggtacactgcacatttcggtacctgacttccatcccagacagcatcccgcccaatgtggaacgcatcaatttaggatacaacagcttggttagattgatggaaacagatttttctggcctgaccaaactggagttactcatgcttcacagcaatggcattcacacaatccctgacaagaccttctcagatttgcaggccttgcaggtcttaaaaatgagctataayaaagtccgaaaacttcagaaagatactttttatggcctcaggagcttgacacgattgcacatggaccacaacaatattgagtttataaacccagaggtttttkatgggctcaactttctccgcctggtgcacttggaaggaaatcagctcactaagctccacccagatacatttgtctctttgagctacctccagatatttaaaatctctttcattaagttcctatacttgtctgataacttcctgacctccctccctcaagagatggtctcctatatgcctgacctagacagcctttacctgcatggaaacccatggacctgtgattgccatttaaagtggttgtctgactggatacaggagaagccagatgtaataaaatgcaaaaaagatagaagtccctctagtgctcagcagtgtccactttgcatgaaccctaggacttctaaaggcaagccgttagctatggtctcagctgcagctttccagtgtgccaagccaaccattgactcatccctgaaatcaaagagcctgactattctggaagacagtagttctgctttcatctctccccaaggtttcatggcaccctttggctccctcactttgaatatgacagatcagtctggaaatgaagctaacatggtctgcagtattcaaaagccctcaaggacatcacccattgcattcactgaagaaaatgactacatcgtgctaaatacttcattttcaacatttttggtgtgcaacatagattacggtcacattcagccagtgtggcaaattttggctttgtacagtgattctcctctgatactagaaaggagccacttgcttagtgaaacaccgcagctctattacaaatataaacaggtggctcctaagcctgaagacatttttaccaacatagaggcagatctcagagcagatccctcttggttaatgcaagaccaaatttccttgcagctgaacagaactgccaccacattcagtacattacaratccagtactccagtgatgctcaaatcactttaccaagagcagagatgaggccagtgaaacacaaatggactatgatttcaagggataacaatactaagctggaacatactgtcttggtaggtggaaccgttggcctgaactgcccaggccaaggagaccccaccccacacgtggattggcttctagctgatggaagtaaagtgagagccccttatgtcagtgaggatggacggatcctaatagacaaaagtggaaaattggaactccagatggctgatagttttgacacaggcgtatatcactgtataagcagcaattatgatgatgcagatattctcacctataggataactgtggtagaacctttggtcgaagcctatcaggaaaatgggattcatcacacagttttcattggtgaaacacttgatcttccatgccattctactggtatcccagatgcctctattagctgggttattccaggaaacaatgtgctctatcagtcatcaagagacaagaaagttctaaacaatggcacattaagaatattacaggtcaccccgaaagaccaaggttattatcgctgtgtggcagccaacccatcaggggttgattttttgattttccaagtttcagtcaagatgaaaggacaaaggcccttggagcatgatggagaaacagagggatctggacttgatgagtccaatcctattgctcatcttaaggagccaccaggtgcacarctccgtacatctgctctgatggaggctgaggttggaaaacacacctcaagcacaagtaagaggcacaactatcgggaattaacactccagcgacgtggagattcaacacatcgacgttttagggagaataggaggcatttccctccctctgctaggagaattgacccacaacattgggcggcactgttggagaaagctaaaaagaatgctatgccagacaagcgagaaaataccacagtgagcccacccccagtggtcacccaactcccaaacatacctggtgaagaagacgattcctcaggcatgctcgctctacatgaggaatttatggtcccggccactaaagctttgaaccttccagcaaggacagtgactgctgactccagaacaatatctgatagtcctatgacaaacataaattatggcacagaattctctcctgttgtgaattcacaaatactaccacctgaagaacccacagatttcaaactgtctactgctattaaaactacagccatgtcaaagaatataaacccaaccatgtcaagccaaatacaaggcacaaccaatcaacattcatccactgtctttccactgctacttggagcaactgaatttcaggactctgaccagatgggaagaggaagagagcatttccaaagtagacccccaataacagtaaggactatgatcaaagatgtcaatgtcaaaatgcttagtagcaccaccaacaaactattattagagtcagtaaataccacaaatagtcatcagacatctgtaagagaagtgagtgaacccaggcacaatcacttctattctcacactactcaaatacttagcacctccacgttcccttcagatccacacacagctgctcattctcagtttccgatccctagaaatagtacagttaacatcccgctgttcagacgctttgggaggcagaggaaaattggcggaagggggcggattatcagcccatatagaactccagttctgcgacggcatagatacagcattttcaggtcaacaaccagaggttcttctgaaaaaagcactactgcattctcagccacagtgctcaatgtgacatgtctgtcctgtcttcccagggagaggctcaccactgccacagcagcattgtcttttccaagtgctgctcccatcaccttccccaaagctgacattgctagagtcccatcagaagagtctacaactctagtccagaatccactattactacttgagaacaaacccagtgtagagaaaacaacacccacaataaaatatttcaggactgaaatttcccaagtgactccaactggtgcagtcatgacatatgctccaacatccatacccatggaaaaaactcacaaagtaaacgccagttacccacgtgtgtctagcaccaatgaagctaaaagagattcagtgattacatcgtcactttcaggtgctatcaccaagccaccaatgactattatagccattacaaggttttcaagaaggaaaattccctggcaacagaactttgtaaataaccataacccaaaaggcagattaaggaatcaacataaagttagtttacaaaaaagcacagctgtgatgcttcctaaaacatctcctgctttacccagagacaaagtctcccctttccatttcaccacactttcaacaagtgtgatgcaaattccatctaataccttgactaccgctcaccacactacgaccaaaacacacaatcctggaagtcttccaacaaagaaggagcttcccttcccaccccttaaccctatgcttcctagtattataagcaaagactcaagtacaaaaagcatcatatcaacgcaaacagcaataccagcaacaactcctaccttccctgcatctgtcatcacttatgaaacccaaacagagagatctagagcacaaacaatacaaagagaacaggagcctcaaaagaagaacaggactgacccaaacatctctccagaccagagttctggcttcactacacccactgctatgacacctcctgttctaaccacagccgaaacttcagtcaagcccagtgtctctgcattcactcattccccaccagaaaacacaactgggatttcaagcacaatcagttttcattcaagaactcttaatctgacagatgtgattgaagaactagcccaagcaagtactcagactttgaagagcacaattgcttctgaaacaactttgtccagcaaatcacaccagagtaccacaactaggaaagcaatcattagacactcaaccataccaccattcttgagcagcagtgctactctaatgccagttcccatctcccctccctttactcagagagcagttactgacaacgtggcgactcccatttccgggcttatgacaaatacagtggtcaagctgcacgaatcctcaaggcacaatgctaaaccacagcaattagtagcagaggttgcaacatcccccaaggttcacccaaatgccaagttcacaattggaaccactcacttcatctactctaatctgttacattctactcccatgccagcactaacaacagttaaatcacagaattctaaattaactccatctccctgggcagaaaaccaattttggcacaaaccatactcagaaattgctgaaaaaggcaaaaagccagaagtaagcatgttggctactacaggcctgtccgaggccaccactcttgtttcagattgggatggacagaagaacacaaagaagagtgactttgataagaaaccagttcaagaagcaacaacttccaaactccttccctttgactctttgtctaggtatatatttgaaaagcccaggatagttggaggaaaagctgcaagttttactattccagctaactcagatgcctttcttccctgtgaagctgttggaaatcccctgcccaccattcattggaccagagtcccatcaggacttgatttatctaagaggaaacagaatagcagggtccaggttctccccaatggtaccctgtccatccagagggtggaaattcaggaccgcggacagtacttgtgttccgcatccaatctgtttggcacagaccaccttcatgtcaccttgtctgtggtttcctatcctcccaggatcctggagagacgtaccaaagagatcacagttcattccggaagcactgtggaactgaagtgcagagcagaaggtaggccaagccctacagttacctggattcttgcaaaccaaacagttgtctcagaatcatcccagggaagtaggcaggctgtggtgacggttgacggaacattggtcctccacaatctcagtatttatgaccgtggcttttacaaatgtgtggccagcaacccaggtggccaggattcactgctggttaaaatacaagtcattgcagcaccacctgttattctagagcaaaggaggcaagtcattgtaggcacttggggtgaaagtttaaaactgccctgtactgcaaaaggaactcctcagcccagcgtttactgggtcctctctgatggcactgaagtgaaaccattacagtttaccaattccaagttgttcttattttcaaatgggactttgtatataagaaacctagcctcttcagacaggggcacttatgaatgcattgctaccagttccactggttcggagcgaagagtagtaatgcttacaatggaagagcgagtgaccagccccaggatagaagctgcatcccagaaaaggactgaagtgaattttggggacaaattactactgaactgctcagccactggggagcccaaaccccaaataatgtggaggttaccatccaaggctgtggtcgaccagcagcatagagtgggcagctggatccacgtctaccctaatggatccctgtttattggatcagtaacagaaaaagacagtggtgtctacttgtgtgtggcaagaaacaaaatgggggatgatctgatactgatgcatgttagcctaagactgaaacctgccaaaattgaccacaagcagtattttagaaagcaagtgctccatgggaaagatttccaagtagattgcaaagcttccggctccccagtgccagagatatcttggagtttgcctgatggaaccatgatcaacaatgcaatgcaagccgatgacagtggccacaggactaggagatatacccttttcaacaatggaactttatacttcaacaaagttggggtagcggaggaaggagattatacttgctatgcccagaacaccctagggaaagatgaaatgaaggtccacttaacagttataacagctgctccccggataaggcagagtaacaaaaccaacaagagaatcaaagctggagacacagctgtccttgactgtgaggtcactggggatcccaaaccaaaaatattttggttgctgccttccaatgacatgatttccttctccattgataggtacacatttcatgccaatgggtctttgaccatcaacaaagtgaaactgctcgattctggagagtacgtatgtgtagcccgaaatcccagtggggatgacaccaaaatgtacaaactggatgtggtctctaaacctccattaatcaatggtctgtatacaaayagaactgttattaaagccacagctgtgagacattccaaaaaacactttgactgcagagctgaagggacaccatctcctgaagtcatgtggatcatgccagacaatattttcctcacagccccatactatggaagcagaatcacagtccataaaaatggaaccttggaaattaggaatgtgaggctttcagattcagccgactttatctgtgtggcccgaaatgaaggtggagagagcgtgttggtagtacagttagaagtactggaaatgctgagaagaccgacatttagaaatccatttaatgaaaaaatagttgcccagctgggaaagtccacagcattgaattgctctgttgatggtaacccaccacctgaaataatctggattttaccaaatggcacacgattttccaatggaccacaaagttatcagtatctgatagcaagcaatggttcttttatcatttctaaaacaactcgggaggatgcaggaaaatatcgctgtgcagctaggaataaagttggctatattgagaaattagtcatattagaaattggccagaagccagttattcttacctatgcaccagggacagtaaaaggcatcagtggagaatctctatcactgcattgtgtgtctgatggaatccctaagccaaatatcaaatggactatgccaagtggttatgtagtagacaggcctcaaattaatgggaaatacatattgcatgacaatggcaccttagtcattaaagaagcaacagcttatgacagaggaaactatatctgtaaggctcaaaatagtgttggtcatacactgattactgttccagtaatgattgtagcctaccctccccgaattacaaatcgtccacccaggagtattgtcaccaggacaggggcagcctttcagctccactgtgtggccttgggagttcccaagccagaaatcacrtgggagatgcctgaccactcccttctctcaacggcaagtaaagagaggacacatggaagtgagcagcttcacttacaaggtaccctagtcattcagaatccccaaacctccgattctgggatatacaaatgcacagcaaagaacccacttggtagtgattatgcagcaacgtatattcaagtaatctga

SEQ ID NO: 129 - protein, 2623 aa, Homo sapiens
  VARIANT (1)...(2623): Xaa = Any Amino Acid
MKVKGRGITCLLVSFAVICLVATPGGKACPRRCACYMPTEVHCTFRYLTSIPDSIPPNVERINLGYNSLVRLMETDFSGLTKLELLMLHSNGIHTIPDKTFSDLQALQVLKMSYNKVRKLQKDTFYGLRSLTRLHMDHNNIEFINPEVFXGLNFLRLVHLEGNQLTKLHPDTFVSLSYLQIFKISFIKFLYLSDNFLTSLPQEMVSYMPDLDSLYLHGNPWTCDCHLKWLSDWIQEKPDVIKCKKDRSPSSAQQCPLCMNPRTSKGKPLAMVSAAAFQCAKPTIDSSLKSKSLTILEDSSSAFISPQGFMAPFGSLTLNMTDQSGNEANMVCSIQKPSRTSPIAFTEENDYIVLNTSFSTFLVCNIDYGHIQPVWQILALYSDSPLILERSHLLSETPQLYYKYKQVAPKPEDIFTNIEADLRADPSWLMQDQISLQLNRTATTFSTLQIQYSSDAQITLPRAEMRPVKHKWTMISRDNNTKLEHTVLVGGTVGLNCPGQGDPTPHVDWLLADGSKVRAPYVSEDGRILIDKSGKLELQMADSFDTGVYHCISSNYDDADILTYRITVVEPLVEAYQENGIHHTVFIGETLDLPCHSTGIPDASISWVIPGNNVLYQSSRDKKVLNNGTLRILQVTPKDQGYYRCVAANPSGVDFLIFQVSVKMKGQRPLEHDGETEGSGLDESNPIAHLKEPPGAQLRTSALMEAEVGKHTSSTSKRHNYRELTLQRRGDSTHRRFRENRRHFPPSARRIDPQHWAALLEKAKKNAMPDKRENTTVSPPPVVTQLPNIPGEEDDSSGMLALHEEFMVPATKALNLPARTVTADSRTISDSPMTNINYGTEFSPVVNSQILPPEEPTDFKLSTAIKTTAMSKNINPTMSSQIQGTTNQHSSTVFPLLLGATEFQDSDQMGRGREHFQSRPPITVRTMIKDVNVKMLSSTTNKLLLESVNTTNSHQTSVREVSEPRHNHFYSHTTQILSTSTFPSDPHTAAHSQFPIPRNSTVNIPLFRRFGRQRKIGGRGRIISPYRTPVLRRHRYSIFRSTTRGSSEKSTTAFSATVLNVTCLSCLPRERLTTATAALSFPSAAPITFPKADIARVPSEESTTLVQNPLLLLENKPSVEKTTPTIKYFRTEISQVTPTGAVMTYAPTSIPMEKTHKVNASYPRVSSTNEAKRDSVITSSLSGAITKPPMTIIAITRFSRRKIPWQQNFVNNHNPKGRLRNQHKVSLQKSTAVMLPKTSPALPRDKVSPFHFTTLSTSVMQIPSNTLTTAHHTTTKTHNPGSLPTKKELPFPPLNPMLPSIISKDSSTKSIISTQTAIPATTPTFPASVITYETQTERSRAQTIQREQEPQKKNRTDPNISPDQSSGFTTPTAMTPPVLTTAETSVKPSVSAFTHSPPENTTGISSTISFHSRTLNLTDVIEELAQASTQTLKSTIASETTLSSKSHQSTTTRKAIIRHSTIPPFLSSSATLMPVPISPPFTQRAVTDNVATPISGLMTNTVVKLHESSRHNAKPQQLVAEVATSPKVHPNAKFTIGTTHFIYSNLLHSTPMPALTTVKSQNSKLTPSPWAENQFWHKPYSEIAEKGKKPEVSMLATTGLSEATTLVSDWDGQKNTKKSDFDKKPVQEATTSKLLPFDSLSRYIFEKPRIVGGKAASFTIPANSDAFLPCEAVGNPLPTIHWTRVPSGLDLSKRKQNSRVQVLPNGTLSIQRVEIQDRGQYLCSASNLFGTDHLHVTLSVVSYPPRILERRTKEITVHSGSTVELKCRAEGRPSPTVTWILANQTVVSESSQGSRQAVVTVDGTLVLHNLSIYDRGFYKCVASNPGGQDSLLVKIQVIAAPPVILEQRRQVIVGTWGESLKLPCTAKGTPQPSVYWVLSDGTEVKPLQFTNSKLFLFSNGTLYIRNLASSDRGTYECIATSSTGSERRVVMLTMEERVTSPRIEAASQKRTEVNFGDKLLLNCSATGEPKPQIMWRLPSKAVVDQQHRVGSWIHVYPNGSLFIGSVTEKDSGVYLCVARNKMGDDLILMHVSLRLKPAKIDHKQYFRKQVLHGKDFQVDCKASGSPVPEISWSLPDGTMINNAMQADDSGHRTRRYTLFNNGTLYFNKVGVAEEGDYTCYAQNTLGKDEMKVHLTVITAAPRIRQSNKTNKRIKAGDTAVLDCEVTGDPKPKIFWLLPSNDMISFSIDRYTFHANGSLTINKVKLLDSGEYVCVARNPSGDDTKMYKLDVVSKPPLINGLYTNRTVIKATAVRHSKKHFDCRAEGTPSPEVMWIMPDNIFLTAPYYGSRITVHKNGTLEIRNVRLSDSADFICVARNEGGESVLVVQLEVLEMLRRPTFRNPFNEKIVAQLGKSTALNCSVDGNPPPEIIWILPNGTRFSNGPQSYQYLIASNGSFIISKTTREDAGKYRCAARNKVGYIEKLVILEIGQKPVILTYAPGTVKGISGESLSLHCVSDGIPKPNIKWTMPSGYVVDRPQINGKYILHDNGTLVIKEATAYDRGNYICKAQNSVGHTLITVPVMIVAYPPRITNRPPRSIVTRTGAAFQLHCVALGVPKPEIXWEMPDHSLLSTASKERTHGSEQLHLQGTLVIQNPQTSDSGIYKCTAKNPLGSDYAATYIQVI

SEQ ID NO: 130 - DNA, 11541 bp, Homo sapiens
  CDS (1)...(11541)
atggacttagcaccagacagggctactggccgcccgtggctcccgttgcacactctatcagtatctcagctccttcgagtgttttggctactgtcattgcttccggggcaggcctgggtccacggggccgagccgcgccaggtgttccaagtgctggaagagcaacctccaggcactctggtaggcaccatccagacgcgccccggcttcacctacaggctcagcgaaagccacgccctgtttgccataaacagtagcaccggagccctgtacaccacctccaccatcgaccgcgagagcctgcccagcgacgtgatcaacctggtggtcctttccagcgcgcccacctaccccaccgaagtgcgagtgctggtgcgggacctcaatgacaacgcccccgttttcccggacccctctatcgtggtcactttcaaggaagacagtagcagcggacgccaagtcatcttagacaccgccaccgactcggacatcggctcaaacggtgtggaccaccgctcctaccgcatcatccgcggcaatgaggcggggcgcttccgtctggacatcaccctgaacccgagcggcgagggagcgttcctgcatctggtgtccaagggcggactggaccgtgaggtcactccgcagtaccagctcctggttgaggtggaggacaagggtgagcctaagcggcggggctaccttcaggtaaacgtgactgtgcaagacattaatgacaaccccccggtttttggcagttctcactaccaggcgggggtgcctgaggacgcggttgtgggttccagcgtcctccaggtggcggcggcggacgcggacgagggcaccaacgcggacatccgctatcgcctgcaggacgaggggacccccttccaaatggaccctgagacgggacttatcacggtgcgggagcccctggacttcgaagctcggcgccaatactcgcttacggtgcaggcgatggacagaggcgtgccttccctcactgggcgcgccgaggcgctgattcagctgctggacgtgaatgacaatgacccggtagtgaagttccgctacttcccggccacctcgcgctacgcctcggtagatgagaatgctcaagtgggcaccgtggtggctctgctcaccgtgacggacgcagattctcccgcggccaacgggaacatctccgtgcaaattctcgggggcaatgagcagcgccactttgaagtgcaaagcagcaaagtgccgaacctgagcctaatcaaggtggccagcgccttggaccgcgagcgcatcccttcctacaacctcacagtttccgtctctgataactacggggcgccccctggcgcagcagtccaggcgcgctcttctgtggcaagcctggtgatttttgttaatgacatcaatgaccatcctcctgtcttttcacagcaagtgtacagagtgaacctgagcgaggaggcgcctccgggaagctatgtgagtgggatatctgccactgatggcgactctggtctcaatgctaatctgcgttacagcattgtctctggcaatggactgggatggttccatatcagtgaacatagcggcctcgtgaccactgggtcctctgggggcctggaccgtgaacttgcttcccagattgttctgaatataagtgcccgggaccagggagttcaccccaaggtgtcctatgcccagcttgtagtaactctcctagatgtgaatgatgaaaagccagtatttagccagccagaagggtatgatgtgtctgtggttgagaatgccccaacagggacagaactgttgatgctcagggcaactgacggggacctgggtgacaacggaacagtgcgcttctccttacaagaggcagagactgaccggaggtccttccgtctggatcctgtgtctgggaggttgagtactatttcctccttggacagagaagagcaagccttctactccctgttggttctggccacagatctgggctcccctccccagtcatcaatggctcgcataaatgtgagtcttctggatataaatgataacagccctgtcttctacccggtccaatactttgctcacattaaggagaatgagcctggaggtagctacatcaccactgtgtctgccactgacccagacttgggtaccaatggtactgtcaaatatagcatatctgctggggacaggtctcggtttcaggtcaatgctcagagtggggttatttctacaagaatggccctagacagagaagaaaaaacagcttatcagttgcaaatagtagctactgatggtggcaatttacaatctcccaaccaggcaatagtaaccatcactgtattggacactcaagacaacccacctgtattcagtcaggttgcctacagctttgtggtttttgagaacgtggcgctgggatatcatgtgggtagtgtgtctgcatccaccatggatctcaattccaacatcagttatctcattactactggggatcagaaaggcatcaactctcaattgacttatagcattgcttcaggtgatagccttgggcagtttactgttgacaagaatggtgtactcaaagtcctaaaagctttggatcgggaaagtcagtccttctacaacttggttgttcaagtgcatgacctgccacagattccagcctccagattcacaagcactgctcaagtctccattattttgttggatgtaaatgataacccaccgacatttctttcccctaaattgacatacattccagaaaatacacctattgatactgttgttttcaaagctcaagcaactgacccagatagtggcccaaacagctatattgagtacactctgctgaaccctttgggaaacaagttcagtattgggaccattgatggtgaagtgaggctcactggagaactggacagagaagaagtttctaattatactctaacagtggtggctacagacaaaggtcaaccatctctctcttcatctacagaggttgtagttatggtacttgacatcaatgataacaaccccatctttgcacaagctttgtataaagtggagattaatgaaaacacacttactggaacagatataatacaagtgttcgcagcagatggagatgaaggcacaaatggacaggttcgctatggcattgttaatggtaataccaatcaggaatttcggatagactctgtcacaggtgccatcactgtcgctaaacctttggatagagaaaagacccctacctaccatttaactgttcaggcaacagatcgaggcagcacacccagaactgatacctccacggtcagcattgttctactggatattaatgactttgttcctgtatttgagctatctccatattctgtaaatgtccctgagaatttagggacactacccagaacaattcttcaggtggtggcaagagatgatgatcgaggatctaacagcaaactctcatatgttctgtttggtggtaatgaagacaatgcttttactctctcagccagtggagaacttggagtaacacagagtctggatcgggaaacaaaagagcgctttgtcttaatgattacagctacagattcaggatcccctgccttgactggaactggaacaatcaacgtcatagtagatgatgtcaatgacaatgtccccacatttgccagtaaagcgtatttcacaacaattcctgaggatgcaccaactggaacagatgttttattggtaaatgcctcagatgctgatgcttcaaagaatgcagttataagttataggatcatcggtggaaactctcagttcacgatcaacccatcgacaggacaaatcatcaccagcgcattgttagatagggaaacaaaagataattatactttggtagtggtctgcagtgatgcgggatccccagagcctctttccagttccaccagtgtgcttgtcactgtgactgatgtcaatgacaatccaccaagatttcagcatcacccatatgtcactcacatcccatctcctactcttccaggttcctttgtctttgcggttacagtcacagatgctgatattggaccaaattctgaactgcattattctctttcgggtagaaattctgaaaaatttcacattgacccactgaggggagccattatggccgccggaccactaaacggagcttcagaagtgacattttctgtgcatgtaaaagatggtggctcatttccaaagacagattctacaacagtgactgttagattcgtgaataaggccgatttccctaaagtcagagccaaagaacaaacgttcatgtttcctgaaaaccaaccagtcagctctcttgtcaccaccatcacaggatcctctttaagaggagaacctatgtcatattatatcgcaagtgggaatcttggcaatactttccagattgatcagttaacagggcaggtgtctattagtcaacctctggattttgaaaagatacaaaaatatgttgtatggatagaggccagagacggtggtttccctcctttctcctcttacgagaaacttgatataacagtattagatgtcaatgataatgccccaatttttaaggaagacccatttatatctgaaatattggaaaacctttcccctcgaaaaatacttactgtttcggcaatggacaaggacagtggacccaatggacagttagattatgaaattgttaatggcaacatggaaaatagtttcagtatcaatcatgctactggtgaaattagaagcgttagacctttggacagggaaaaagtatctcattatgtcctaaccataaaatcatcagacaaagggtccccgtctcagagtacttcagtaaaagtcatgattaacattttagatgaaaatgataatgcccctaggttttctcagatatttagtgcccatgttcctgaaaattcccccttaggatacacagttacccgtgtcacaacttctgatgaagacattgggatcaatgcaattagtagatattctataatggatgcaagtcttccatttacaattaatcccagcacaggggatattgtcataagcagacctttaaatagggaagatacagaccgttacagaattcgagtttccgcacatgattctgggtggactgtaagtacagatgtcacaatatttgtgacagacatcaatgacaatgctccaagatttagcagaacttcctattatttagattgccctgaacttactgagattggctccaaagtaactcaggtatttgcaacagatcctgatgagggatcaaatggacaagtgttttatttcataaaatcccaatcagaatatttcaggattaatgccaccactggagagattttcaataaacagatcttaaaataccaaaatgtcactggcttcagtaatgtgaatatcaacaggcatagttttatagtgacatcttcagatcgaggtaaaccttccttaattagtgagacaacagttaccatcaatatagtggacagtaatgacaatgcacctcaatttcttaaaagtaaatatttcactccagtcaccaaaaatgttaaggttggtacgaagttaatcagagttacagcaatagatgacaaagattttggactgaattcagaagtggagtatttcatttctaatgataaccatttaggaaaatttaagttggacaatgatacggggtggatttcagtagcatcctccctgatttctgacttgaaccaaaacttttttatcacagtcactgcaaaggataagggaaaccctccactttcttcccaagcaactgttcacataactgtcactgaggaaaactaccatacacctgaattctctcaaagccacatgagtgcaaccatccctgagagccatagcattgggtccattgtcagaactgtttctgcaagagatagagatgcagcgatgaatggcttgattaagtacagcatttcttcaggaaatgaagaaggcatttttgcaatcaattcttctacaggtatattaacactagccaaagctcttgattatgagctatgccagaaacacgaaatgacgattagtgctatagatggaggatgggttgcaagaactggttactgcagtgtgaccgtaaatgtgattgatgtgaatgataattctccagtattcctctctgatgactatttccctactgttttggaaaatgccccaagtggaacaacagttatccacctaaatgcaacagatgctgactctggaacaaatgctgtgattgcgtatactgtacagtcatctgacagtgacctctttgtcattgaccctaacacaggagtcataaccactcaaggcttcttggattttgaaaccaagcagagctaccatcttactgtgaaagccttcaatgtccccgatgaggaaaggtgtagctttgccactgttaatatacaattaaaagggacaaatgaatatgtgccccgttttgtttccaaactttactattttgaaatctcagaagcagctcctaaaggtactattgttggagaagtgtttgctagcgaccgtgatttgggcactgatggggaggtacactatttgatttttggtaatagtcgaaagaagggtttccagatcaataagaagactggacagatttatgtttctggaattcttgatcgagaaaaagaagaaagggtgtctttgaaggtattggccaagaactttggcagcattagaggtgcagatatagatgaggtcactgtaaatgtcaccgtgcttgatgcaaatgacccacccatttttactctaaacatctacagtgtgcagatcagtgaaggggtcccaataggaactcatgtgacctttgtcagtgcctttgactcagactccatccccagctggagcaggttttcttacttcatcggatcagggaatgaaaatggtgccttttctattaatccgcagacaggacagatcaccgttactgcagaattagatcgagaaacccttcccatctataatctctcagttttggctgttgattcagggaccccctcagctacaggtagtgcctctttattagtcaccctggaagatataaatgataacgggcccatgctgactgtcagtgaaggagaagtcatggaaaacaaacggccaggcactttggtgatgacccttcagtccactgaccctgatctccctccaaatcaaggtccctttacttattacttgctgagcacaggtcctgccaccagttatttcagtctgagcactgctggagttctgagcacaaccagagagattgacagagagcagattgcagacttctatctgtctgtggttaccaaggattctggtgttcctcaaatgtcttccacaggaactgtgcatatcacagttatagaccaaaatgacaatccttcacagtctcggacggtggagatatttgttaattattatggtaacttgtttcccggtgggattttaggctctgtgaagccacaggatccagatgtgttagacagcttccactgctcccttacttcaggagttaccagcctcttcagtattccagggggtacttgtgatctgaattcccagccaaggtccacagatggcacgtttgatctgactgtccttagcaatgatggagttcacagcacagtcacgagcaacatccgagttttctttgctggattttccaatgccacagtggataacagcatcttacttcgtctcggcgtaccaacagtaaaggacttcttgaccaaccactatcttcattttttacgcattgccagctcacagctgacaggcttagggactgctgtgcaactgtacagtgcatatgaagagaacaatagaacgtttcttttggcagctgtgaagcgaaatcataatcagtatgtgaatcccagtggcgtagccaccttctttgaaagcatcaaagagatccttctccggcagagtggagtaaaggtggaatctgtggatcatgactcctgtgtgcatggcccatgtcagaatggagggagctgtctacgaagattggctgtgagctccgtattaaaaagccgtgagagtcttccagtcatcatcgtggcaaatgaacctctgcagcctttcttatgcaagtgtctgccaggatatgcgggtagctggtgtgaaatagatatagatgaatgtcttccatcaccttgccacaatggtggaacctgtcacaatttagtgggaggattttcatgcagctgcccagatggcttcactggtagggcgtgtgagagagatatcaatgagtgcctgcagagtccttgcaagaatggtgccatctgccagaattttccaggaagcttcaactgtgtttgcaaaactggatacacagggaaaatgtgtgaatcttcagtcaattactgtgaatgcaacccctgctttaatggtggttcctgccaaagtggtgtggattcttattattgtcattgtccatttggtgtctttggaaaacactgcgagttgaacagttatggatttgaggagttatcatacatggaatttccaagcttggaccccaataacaactatatttatgtcaaatttgccacgattaaaagtcatgccttattgctttacaactatgacaaccagacaggcgaccgggctgagtttttggcccttgaaattgccgaagaaagactaagattctcttataatttaggcagtggtacatataagctcaccaccatgaagaaggtgtcagatggacattttcacactgtgattgccaggagagcaggaatggcagcctccttaactgtggactcctgttctgagaaccaagagccaggatattgtactgtcagtaatgtggcagtttcagatgactggactcttgatgttcagccaaatagagttacagttggaggtatcagatctctagaaccaatccttcagagaagaggacacgtggaaagccatgattttgttgggtgtataatggagtttgcagtcaatggaaggcctctggaacccagccaagctttggcagcacaaggcatcctagatcaatgccctaggctggaaggcgcttgtactcgcagcccatgccaacatggtggcacatgtatggattactggtcatggcagcagtgtcattgcaaagagggactcactgggaaatactgtgaaaaatctgttactcctgacactgccttatcattagaaggcaaagggcgcttggactaccacatgagtcagaatgagaagcgggaatatttgttaaggcaaagcttacgaggtgccatgttggagccttttggtgtgaacagtctggaagtaaaatttaggaccagaagcgagaatggcgttttaatccatatccaagaaagcagcaattacactactgtgaaaattaagaatggcaaagtatattttacatccgatgcaggaattgctgggaaagtggagagaaatattcctgaagtatatgttgcagacggccactggcacacttttctaattgggaaaaatggaacagcaacagtattgtctgttgacagaatatataacagagatattatccaccctactcaggacttcggtggccttgatgtgcttactatatcacttggaggaattccacccaatcaagcacatcgagatgcccaaacagcaggttttgatggctgcattgcttctatgtggtatggtggagaaagtcttcctttcagcgggaagcatagcttggcctccatctcaaaaacagatccctcagtgaagattggctgccgtggcccgaacatttgtgccagcaacccctgctggggtgatttgctgtgcattaatcagtggtatgcctacaggtgtgtccctcctggggactgtgcctcccacccgtgccagaatggtggcagctgtgagccaggcctgcactccggcttcacctgtagctgcccagactcgcacacgggaaggacctgtgagatggtggtggcctgtcttggcgtcctctgtcctcaggggaaggtgtgcaaagctggaagtcctgcggggcatgtctgtgttctgagtcagggccctgaagagatctctctgcctttgtgggctgtgcctgccatcgtgggcagctgcgcaaccgtcttggccctcctggtccttagcctgatcctgtgtaaccagtgcagggggaagaaggccaaaaatcccaaagaggagaagaaaccgaaggagaagaagaaaaagggaagtgagaacgttgcttttgatgaccctgacaatatccctccctatggggatgacatgactgtgaggaagcagcctgaagggaacccaaaaccagatatcattgaaagggaaaacccctaccttatctatgatgaaactgatattcctcacaactcagaaaccatccccagcgcccctttggcatctccagagcaggagatagagcactatgacattgacaacgccagcagcatcgccccttcggatgcagacatcattcaacactacaagcagttccgcagccacacaccaaaattttcaatccagaggcacagtcccctaggctttgcaaggcaatcccccatgcccttaggagcaagcagtttgacttaccagccttcatatggtcaaggtttgagaaccagctccctaagccactcagcatgcccaactcccaaccctctgtctcgacacagtccagcccctttctccaaatcttctacgttctatagaaacagcccagcaagggaattgcatcttcctataagggatggtaatactttggaaatgcatggtgacacctgccaacctggcattttcaactatgccacaaggctgggaaggagaagcaagagtcctcaggccatggcatcacatggttctagaccagggagtcgcctaaagcagccgattgggcagattccactggaatcttctcctccagtcggactttctattgaagaagtggagaggctcaacacacctcgccctagaaacccaagtatctgcagtgcagaccatgggaggtcttcttcagaggaggactgcagaaggccactgtctagaacaaggaatccagcggatggcattccagctccagaatcctcttctgatagtgactcccatgaatctttcacttgctcagaaatggaatatgacagggagaagccaatggtatatacttccaggatgcccaaattatctcaagtcaatgaatctgatgcagatgatgaagataattatggagccagactgaagcctcgaaggtaccacggtcgcagggccgagggaggacctgtgggcacccaggcagcagcaccaggcactgctgacaacacactgcccatgaagctagggcagcaagcagggactttcaactgggacaaccttttgaactggggccctggctttggccattatgtagatgtttttaaagatttggcatctcttccagaaaaagcagcagcaaatgaagaaggcaaagctgggacaactaaaccagtccccaaagatggggaagcagaacagtatgtgtga

SEQ ID NO: 131 - protein, 3846 aa, Homo sapiens
MDLAPDRATGRPWLPLHTLSVSQLLRVFWLLSLLPGQAWVHGAEPRQVFQVLEEQPPGTLVGTIQTRPGFTYRLSESHALFAINSSTGALYTTSTIDRESLPSDVINLVVLSSAPTYPTEVRVLVRDLNDNAPVFPDPSIVVTFKEDSSSGRQVILDTATDSDIGSNGVDHRSYRIIRGNEAGRFRLDITLNPSGEGAFLHLVSKGGLDREVTPQYQLLVEVEDKGEPKRRGYLQVNVTVQDINDNPPVFGSSHYQAGVPEDAVVGSSVLQVAAADADEGTNADIRYRLQDEGTPFQMDPETGLITVREPLDFEARRQYSLTVQAMDRGVPSLTGRAEALIQLLDVNDNDPVVKFRYFPATSRYASVDENAQVGTVVALLTVTDADSPAANGNISVQILGGNEQRHFEVQSSKVPNLSLIKVASALDRERIPSYNLTVSVSDNYGAPPGAAVQARSSVASLVIFVNDINDHPPVFSQQVYRVNLSEEAPPGSYVSGISATDGDSGLNANLRYSIVSGNGLGWFHISEHSGLVTTGSSGGLDRELASQIVLNISARDQGVHPKVSYAQLVVTLLDVNDEKPVFSQPEGYDVSVVENAPTGTELLMLRATDGDLGDNGTVRFSLQEAETDRRSFRLDPVSGRLSTISSLDREEQAFYSLLVLATDLGSPPQSSMARINVSLLDINDNSPVFYPVQYFAHIKENEPGGSYITTVSATDPDLGTNGTVKYSISAGDRSRFQVNAQSGVISTRMALDREEKTAYQLQIVATDGGNLQSPNQAIVTITVLDTQDNPPVFSQVAYSFVVFENVALGYHVGSVSASTMDLNSNISYLITTGDQKGINSQLTYSIASGDSLGQFTVDKNGVLKVLKALDRESQSFYNLVVQVHDLPQIPASRFTSTAQVSIILLDVNDNPPTFLSPKLTYIPENTPIDTVVFKAQATDPDSGPNSYIEYTLLNPLGNKFSIGTIDGEVRLTGELDREEVSNYTLTVVATDKGQPSLSSSTEVVVMVLDINDNNPIFAQALYKVEINENTLTGTDIIQVFAADGDEGTNGQVRYGIVNGNTNQEFRIDSVTGAITVAKPLDREKTPTYHLTVQATDRGSTPRTDTSTVSIVLLDINDFVPVFELSPYSVNVPENLGTLPRTILQVVARDDDRGSNSKLSYVLFGGNEDNAFTLSASGELGVTQSLDRETKERFVLMITATDSGSPALTGTGTINVIVDDVNDNVPTFASKAYFTTIPEDAPTGTDVLLVNASDADASKNAVISYRIIGGNSQFTINPSTGQIITSALLDRETKDNYTLVVVCSDAGSPEPLSSSTSVLVTVTDVNDNPPRFQHHPYVTHIPSPTLPGSFVFAVTVTDADIGPNSELHYSLSGRNSEKFHIDPLRGAIMAAGPLNGASEVTFSVHVKDGGSFPKTDSTTVTVRFVNKADFPKVRAKEQTFMFPENQPVSSLVTTITGSSLRGEPMSYYIASGNLGNTFQIDQLTGQVSISQPLDFEKIQKYVVWIEARDGGFPPFSSYEKLDITVLDVNDNAPIFKEDPFISEILENLSPRKILTVSAMDKDSGPNGQLDYEIVNGNMENSFSINHATGEIRSVRPLDREKVSHYVLTIKSSDKGSPSQSTSVKVMINILDENDNAPRFSQIFSAHVPENSPLGYTVTRVTTSDEDIGINAISRYSIMDASLPFTINPSTGDIVISRPLNREDTDRYRIRVSAHDSGWTVSTDVTIFVTDINDNAPRFSRTSYYLDCPELTEIGSKVTQVFATDPDEGSNGQVFYFIKSQSEYFRINATTGEIFNKQILKYQNVTGFSNVNINRHSFIVTSSDRGKPSLISETTVTINIVDSNDNAPQFLKSKYFTPVTKNVKVGTKLIRVTAIDDKDFGLNSEVEYFISNDNHLGKFKLDNDTGWISVASSLISDLNQNFFITVTAKDKGNPPLSSQATVHITVTEENYHTPEFSQSHMSATIPESHSIGSIVRTVSARDRDAAMNGLIKYSISSGNEEGIFAINSSTGILTLAKALDYELCQKHEMTISAIDGGWVARTGYCSVTVNVIDVNDNSPVFLSDDYFPTVLENAPSGTTVIHLNATDADSGTNAVIAYTVQSSDSDLFVIDPNTGVITTQGFLDFETKQSYHLTVKAFNVPDEERCSFATVNIQLKGTNEYVPRFVSKLYYFEISEAAPKGTIVGEVFASDRDLGTDGEVHYLIFGNSRKKGFQINKKTGQIYVSGILDREKEERVSLKVLAKNFGSIRGADIDEVTVNVTVLDANDPPIFTLNIYSVQISEGVPIGTHVTFVSAFDSDSIPSWSRFSYFIGSGNENGAFSINPQTGQITVTAELDRETLPIYNLSVLAVDSGTPSATGSASLLVTLEDINDNGPMLTVSEGEVMENKRPGTLVMTLQSTDPDLPPNQGPFTYYLLSTGPATSYFSLSTAGVLSTTREIDREQIADFYLSVVTKDSGVPQMSSTGTVHITVIDQNDNPSQSRTVEIFVNYYGNLFPGGILGSVKPQDPDVLDSFHCSLTSGVTSLFSIPGGTCDLNSQPRSTDGTFDLTVLSNDGVHSTVTSNIRVFFAGFSNATVDNSILLRLGVPTVKDFLTNHYLHFLRIASSQLTGLGTAVQLYSAYEENNRTFLLAAVKRNHNQYVNPSGVATFFESIKEILLRQSGVKVESVDHDSCVHGPCQNGGSCLRRLAVSSVLKSRESLPVIIVANEPLQPFLCKCLPGYAGSWCEIDIDECLPSPCHNGGTCHNLVGGFSCSCPDGFTGRACERDINECLQSPCKNGAICQNFPGSFNCVCKTGYTGKMCESSVNYCECNPCFNGGSCQSGVDSYYCHCPFGVFGKHCELNSYGFEELSYMEFPSLDPNNNYIYVKFATIKSHALLLYNYDNQTGDRAEFLALEIAEERLRFSYNLGSGTYKLTTMKKVSDGHFHTVIARRAGMAASLTVDSCSENQEPGYCTVSNVAVSDDWTLDVQPNRVTVGGIRSLEPILQRRGHVESHDFVGCIMEFAVNGRPLEPSQALAAQGILDQCPRLEGACTRSPCQHGGTCMDYWSWQQCHCKEGLTGKYCEKSVTPDTALSLEGKGRLDYHMSQNEKREYLLRQSLRGAMLEPFGVNSLEVKFRTRSENGVLIHIQESSNYTTVKIKNGKVYFTSDAGIAGKVERNIPEVYVADGHWHTFLIGKNGTATVLSVDRIYNRDIIHPTQDFGGLDVLTISLGGIPPNQAHRDAQTAGFDGCIASMWYGGESLPFSGKHSLASISKTDPSVKIGCRGPNICASNPCWGDLLCINQWYAYRCVPPGDCASHPCQNGGSCEPGLHSGFTCSCPDSHTGRTCEMVVACLGVLCPQGKVCKAGSPAGHVCVLSQGPEEISLPLWAVPAIVGSCATVLALLVLSLILCNQCRGKKAKNPKEEKKPKEKKKKGSENVAFDDPDNIPPYGDDMTVRKQPEGNPKPDIIERENPYLIYDETDIPHNSETIPSAPLASPEQEIEHYDIDNASSIAPSDADIIQHYKQFRSHTPKFSIQRHSPLGFARQSPMPLGASSLTYQPSYGQGLRTSSLSHSACPTPNPLSRHSPAPFSKSSTFYRNSPARELHLPIRDGNTLEMHGDTCQPGIFNYATRLGRRSKSPQAMASHGSRPGSRLKQPIGQIPLESSPPVGLSIEEVERLNTPRPRNPSICSADHGRSSSEEDCRRPLSRTRNPADGIPAPESSSDSDSHESFTCSEMEYDREKPMVYTSRMPKLSQVNESDADDEDNYGARLKPRRYHGRRAEGGPVGTQAAAPGTADNTLPMKLGQQAGTFNWDNLLNWGPGFGHYVDVFKDLASLPEKAAANEEGKAGTTKPVPKDGEAEQYV

SEQ ID NO: 132 - DNA, 13242 bp, Homo sapiens
attctcccggttccccaccaccccttccccggtgcgcagttgtgcttggacgtttgttcctccctcttcacgttcttcgctgcgggtaagttctaaagtttctgaagaccgttctttgcaatgattcctcatataccttagatacaggcaacttctcccaactctcatccacccgggtgaaaacgctcagactatctggattcaaaaacaaagtaaaagggggcatatataagaggcttgagaaacttttctgggaactcagctcacaggagtgtcccgcggaatgccctgccgcttttcgccacagcatctctcttgcactccgcgttcaactggctacctagagtcttttgctgatgctacttgcttttgccggactggaggttctttgaaatagcagaggtctcagaccaagccgtcagctgaatctttgctggcgctccttaatccctgtaaatatcattgcgtttgcttcaccccttccttctctttatcacatcgttttagggagccaggaccatggacttagcaccagacagggctactggccgcccgtggctcccgttgcacactctatcagtatctcagctccttcgagtgttttggctactgtcattgcttccggggcaggcctgggtccacggggccgagccgcgccaggtgttccaagtgctggaagagcaacctccaggcactctggtaggcaccatccagacgcgccccggcttcacctacaggctcagcgaaagccacgccctgtttgccataaacagtagcaccggagccctgtacaccacctccaccatcgaccgcgagagcctgcccagcgacgtgatcaacctggtggtcctttccagcgcgcccacctaccccaccgaagtgcgagtgctggtgcgggacctcaatgacaacgcccccgttttcccggacccctctatcgtggtcactttcaaggaagacagtagcagcggacgccaagtcatcttagacaccgccaccgactcggacatcggctcaaacggtgtggaccaccgctcctaccgcatcatccgcggcaatgaggcggggcgcttccgtctggacatcaccctgaacccgagcggcgagggagcgttcctgcatctggtgtccaagggcggactggaccgtgaggtcactccgcagtaccagctcctggttgaggtggaggacaagggtgagcctaagcggcggggctaccttcaggtaaacgtgactgtgcaagacattaatgacaaccccccggtttttggcagttctcactaccaggcgggggtgcctgaggacgcggttgtgggttccagcgtcctccaggtggcggcggcggacgcggacgagggcaccaacgcggacatccgctatcgcctgcaggacgaggggacccccttccaaatggaccctgagacgggacttatcacggtgcgggagcccctggacttcgaagctcggcgccaatactcgcttacggtgcaggcgatggacagaggcgtgccttccctcactgggcgcgccgaggcgctgattcagctgctggacgtgaatgacaatgacccggtagtgaagttccgctacttcccggccacctcgcgctacgcctcggtagatgagaatgctcaagtgggcaccgtggtggctctgctcaccgtgacggacgcagattctcccgcggccaacgggaacatctccgtgcaaattctcgggggcaatgagcagcgccactttgaagtgcaaagcagcaaagtgccgaacctgagcctaatcaaggtggccagcgccttggaccgcgagcgcatcccttcctacaacctcacagtttccgtctctgataactacggggcgccccctggcgcagcagtccaggcgcgctcttctgtggcaagcctggtgatttttgttaatgacatcaatgaccatcctcctgtcttttcacagcaagtgtacagagtgaacctgagcgaggaggcgcctccgggaagctatgtgagtgggatatctgccactgatggcgactctggtctcaatgctaatctgcgttacagcattgtctctggcaatggactgggatggttccatatcagtgaacatagcggcctcgtgaccactgggtcctctgggggcctggaccgtgaacttgcttcccagattgttctgaatataagtgcccgggaccagggagttcaccccaaggtgtcctatgcccagcttgtagtaactctcctagatgtgaatgatgaaaagccagtatttagccagccagaagggtatgatgtgtctgtggttgagaatgccccaacagggacagaactgttgatgctcagggcaactgacggggacctgggtgacaacggaacagtgcgcttctccttacaagaggcagagactgaccggaggtccttccgtctggatcctgtgtctgggaggttgagtactatttcctccttggacagagaagagcaagccttctactccctgttggttctggccacagatctgggctcccctccccagtcatcaatggctcgcataaatgtgagtcttctggatataaatgataacagccctgtcttctacccggtccaatactttgctcacattaaggagaatgagcctggaggtagctacatcaccactgtgtctgccactgacccagacttgggtaccaatggtactgtcaaatatagcatatctgctggggacaggtctcggtttcaggtcaatgctcagagtggggttatttctacaagaatggccctagacagagaagaaaaaacagcttatcagttgcaaatagtagctactgatggtggcaatttacaatctcccaaccaggcaatagtaaccatcactgtattggacactcaagacaacccacctgtattcagtcaggttgcctacagctttgtggtttttgagaacgtggcgctgggatatcatgtgggtagtgtgtctgcatccaccatggatctcaattccaacatcagttatctcattactactggggatcagaaaggcatcaactctcaattgacttatagcattgcttcaggtgatagccttgggcagtttactgttgacaagaatggtgtactcaaagtcctaaaagctttggatcgggaaagtcagtccttctacaacttggttgttcaagtgcatgacctgccacagattccagcctccagattcacaagcactgctcaagtctccattattttgttggatgtaaatgataacccaccgacatttctttcccctaaattgacatacattccagaaaatacacctattgatactgttgttttcaaagctcaagcaactgacccagatagtggcccaaacagctatattgagtacactctgctgaaccctttgggaaacaagttcagtattgggaccattgatggtgaagtgaggctcactggagaactggacagagaagaagtttctaattatactctaacagtggtggctacagacaaaggtcaaccatctctctcttcatctacagaggttgtagttatggtacttgacatcaatgataacaaccccatctttgcacaagctttgtataaagtggagattaatgaaaacacacttactggaacagatataatacaagtgttcgcagcagatggagatgaaggcacaaatggacaggttcgctatggcattgttaatggtaataccaatcaggaatttcggatagactctgtcacaggtgccatcactgtcgctaaacctttggatagagaaaagacccctacctaccatttaactgttcaggcaacagatcgaggcagcacacccagaactgatacctccacggtcagcattgttctactggatattaatgactttgttcctgtatttgagctatctccatattctgtaaatgtccctgagaatttagggacactacccagaacaattcttcaggtggtggcaagagatgatgatcgaggatctaacagcaaactctcatatgttctgtttggtggtaatgaagacaatgcttttactctctcagccagtggagaacttggagtaacacagagtctggatcgggaaacaaaagagcgctttgtcttaatgattacagctacagattcaggatcccctgccttgactggaactggaacaatcaacgtcatagtagatgatgtcaatgacaatgtccccacatttgccagtaaagcgtatttcacaacaattcctgaggatgcaccaactggaacagatgttttattggtaaatgcctcagatgctgatgcttcaaagaatgcagttataagttataggatcatcggtggaaactctcagttcacgatcaacccatcgacaggacaaatcatcaccagcgcattgttagatagggaaacaaaagataattatactttggtagtggtctgcagtgatgcgggatccccagagcctctttccagttccaccagtgtgcttgtcactgtgactgatgtcaatgacaatccaccaagatttcagcatcacccatatgtcactcacatcccatctcctactcttccaggttcctttgtctttgcggttacagtcacagatgctgatattggaccaaattctgaactgcattattctctttcgggtagaaattctgaaaaatttcacattgacccactgaggggagccattatggccgccggaccactaaacggagcttcagaagtgacattttctgtgcatgtaaaagatggtggctcatttccaaagacagattctacaacagtgactgttagattcgtgaataaggccgatttccctaaagtcagagccaaagaacaaacgttcatgtttcctgaaaaccaaccagtcagctctcttgtcaccaccatcacaggatcctctttaagaggagaacctatgtcatattatatcgcaagtgggaatcttggcaatactttccagattgatcagttaacagggcaggtgtctattagtcaacctctggattttgaaaagatacaaaaatatgttgtatggatagaggccagagacggtggtttccctcctttctcctcttacgagaaacttgatataacagtattagatgtcaatgataatgccccaatttttaaggaagacccatttatatctgaaatattggaaaacctttcccctcgaaaaatacttactgtttcggcaatggacaaggacagtggacccaatggacagttagattatgaaattgttaatggcaacatggaaaatagtttcagtatcaatcatgctactggtgaaattagaagcgttagacctttggacagggaaaaagtatctcattatgtcctaaccataaaatcatcagacaaagggtccccgtctcagagtacttcagtaaaagtcatgattaacattttagatgaaaatgataatgcccctaggttttctcagatatttagtgcccatgttcctgaaaattcccccttaggatacacagttacccgtgtcacaacttctgatgaagacattgggatcaatgcaattagtagatattctataatggatgcaagtcttccatttacaattaatcccagcacaggggatattgtcataagcagacctttaaatagggaagatacagaccgttacagaattcgagtttccgcacatgattctgggtggactgtaagtacagatgtcacaatatttgtgacagacatcaatgacaatgctccaagatttagcagaacttcctattatttagattgccctgaacttactgagattggctccaaagtaactcaggtatttgcaacagatcctgatgagggatcaaatggacaagtgttttatttcataaaatcccaatcagaatatttcaggattaatgccaccactggagagattttcaataaacagatcttaaaataccaaaatgtcactggcttcagtaatgtgaatatcaacaggcatagttttatagtgacatcttcagatcgaggtaaaccttccttaattagtgagacaacagttaccatcaatatagtggacagtaatgacaatgcacctcaatttcttaaaagtaaatatttcactccagtcaccaaaaatgttaaggttggtacgaagttaatcagagttacagcaatagatgacaaagattttggactgaattcagaagtggagtatttcatttctaatgataaccatttaggaaaatttaagttggacaatgatacggggtggatttcagtagcatcctccctgatttctgacttgaaccaaaacttttttatcacagtcactgcaaaggataagggaaaccctccrctttcttcccaagcaactgttcacataactgtcactgaggaaaactaccatacacctgaattctctcaaagccacatgagtgcaaccatccctgagagccatagcattgggtccattgtcagaactgtttctgcaagagatagagatgcagcgatgaatggcttgattaagtacagcatttcttcaggaaatgaagaaggcatttttgcaatcaattcttctacaggtatattaacactagccaaagctcttgattatgagctatgccagaaacacgaaatgacgattagtgctatagatggaggatgggttgcaagaactggttactgcagtgtgaccgtaaatgtgattgatgtgaatgataattctccagtattcctctctgatgactatttccctactgttttggaaaatgccccaagtggaacaacagttatccacctaaatgcaacagatgctgactctggaacaaatgctgtgattgcgtatactgtacagtcatctgacagtgacctctttgtcattgaccctaacacaggagtcataaccactcaaggcttcttggattttgaaaccaagcagagctaccatcttactgtgaaagccttcaatgtccccgatgaggaaaggtgtagctttgccactgttaatatacaattaaaagggacaaatgaatatgtgccccgttttgtttccaaactttactattttgaaatctcagaagcagctcctaaaggtactattgttggagaagtgtttgctagcgaccgtgatttgggcactgatggggaggtacactatttgatttttggtaatagtcgaaagaagggtttccagatcaataagaagactggacagatttatgtttctggaattcttgatcgagaaaaagaagaaagggtgtctttgaaggtattggccaagaactttggcagcattagaggtgcagatatagatgaggtcactgtaaatgtcaccgtgcttgatgcaaatgacccacccatttttactctaaacatctacagtgtgcagatcagtgaaggggtcccaataggaactcatgtgacctttgtcagtgcctttgactcagactccatccccagctggagcaggttttcttacttcatcggatcagggaatgaaaatggtgccttttctattaatccgcagacaggacagatcaccgttactgcagaattagatcgagaaacccttcccatctataatctctcagttttggctgttgattcagggaccccctcagctacaggtagtgcctctttattagtcaccctggaagatataaatgataacgggcccatgctgactgtcagtgaaggagaagtcatggaaaacaaacggccaggcactttggtgatgacccttcagtccactgaccctgatctccctccaaatcaaggtccctttacttattacttgctgagcacaggtcctgccaccagttatttcagtctgagcactgctggagttctgagcacaaccagagagattgacagagagcagattgcagacttctatctgtctgtggttaccaaggattctggtgttcctcaaatgtcttccacaggaactgtgcatatcacagttatagaccaaaatgacaatccttcacagtctcggacggtggagatatttgttaattattatggtaacttgtttcccggtgggattttaggctctgtgaagccacaggatccagatgtgttagacagcttccactgctcccttacttcaggagttaccagcctcttcagtattccagggggtacttgtgatctgaattcccagccaaggtccacagatggcacgtttgatctgactgtccttagcaatgatggagttcacagcacagtcacgagcaacatccgagttttctttgctggattttccaatgccacagtggataacagcatcttacttcgtctcggcgtaccaacagtaaaggacttcttgaccaaccactatcttcattttttacgcattgccagctcacagctgacaggcttagggactgctgtgcaactgtacagtgcatatgaagagaacaatagaacgtttcttttggcagctgtgaagcgaaatcataatcagtatgtgaatcccagtggcgtagccaccttctttgaaagcatcaaagagatccttctccggcagagtggagtaaaggtggaatctgtggatcatgactcctgtgtgcatggcccatgtcagaatggagggagctgtctacgaagattggctgtgagctccgtattaaaaagccgtgagagtcttccagtcatcatcgtggcaaatgaacctctgcagcctttcttatgcaagtgtctgccaggatatgcgggtagctggtgtgaaatagatatagatgaatgtcttccatcaccttgccacaatggtggaacctgtcacaatttagtgggaggattttcatgcagctgcccagatggcttcactggtagggcgtgtgagagagatatcaatgagtgcctgcagagtccttgcaagaatggtgccatctgccagaattttccaggaagcttcaactgtgtttgcaaaactggatacacagggaaaatgtgtgaatcttcagtcaattactgtgaatgcaacccctgctttaatggtggttcctgccaaagtggtgtggattcttattattgtcattgtccatttggtgtctttggaaaacactgcgagttgaacagttatggatttgaggagttatcatacatggaatttccaagcttggaccccaataacaactatatttatgtcaaatttgccacgattaaaagtcatgccttattgctttacaactatgacaaccagacaggcgaccgggctgagtttttggcccttgaaattgccgaagaaagactaagattctcttataatttaggcagtggtacatataagctcaccaccatgaagaaggtgtcagatggacattttcacactgtgattgccaggagagcaggaatggcagcctccttaactgtggactcctgttctgagaaccaagagccaggatattgtactgtcagtaatgtggcagtttcagatgactggactcttgatgttcagccaaatagagttacagttggaggtatcagatctctagaaccaatccttcagagaagaggacacgtggaaagccatgattttgttgggtgtataatggagtttgcagtcaatggaaggcctctggaacccagccaagctttggcagcacaaggcatcctagatcaatgccctaggctggaaggcgcttgtactcgcagcccatgccaacatggtggcacatgtatggattactggtcatggcagcagtgtcattgcaaagagggactcactgggaaatactgtgaaaaatctgttactcctgacactgccttatcattagaaggcaaagggcgcttggactaccacatgagtcagaatgagaagcgggaatatttgttaaggcaaagcttacgaggtgccatgttggagccttttggtgtgaacagtctggaagtaaaatttaggaccagaagcgagaatggcgttttaatccatatccaagaaagcagcaattacactactgtgaaaattaagaatggcaaagtatattttacatccgatgcaggaattgctgggaaagtggagagaaatattcctgaagtatatgttgcagacggccactggcacacttttctaattgggaaaaatggaacagcaacagtattgtctgttgacagaatatataacagagatattatccaccctactcaggacttcggtggccttgatgtgcttactatatcacttggaggaattccacccaatcaagcacatcgagatgcccaaacagcaggttttgatggctgcattgcttctatgtggtatggtggagaaagtcttcctttcagcgggaagcatagcttggcctccatctcaaaaacagatccctcagtgaagattggctgccgtggcccgaacatttgtgccagcaacccctgctggggtgatttgctgtgcattaatcagtggtatgcctacaggtgtgtccctcctggggactgtgcctcccacccgtgccagaatggtggcagctgtgagccaggcctgcactccggcttcacctgtagctgcccagactcgcacacgggaaggacctgtgagatggtggtggcctgtcttggcgtcctctgtcctcaggggaaggtgtgcaaagctggaagtcctgcggggcatgtctgtgttctgagtcagggccctgaagagatctctctgcctttgtgggctgtgcctgccatcgtgggcagctgcgcaaccgtcttggccctcctggtccttagcctgatcctgtgtaaccagtgcagggggaagaaggccaaaaatcccaaagaggagaagaaaccgaaggagaagaagaaaaagggaagtgagaacgttgcttttgatgaccctgacaatatccctccctatggggatgacatgactgtgaggaagcagcctgaagggaacccaaaaccagatatcattgaaagggaaaacccctaccttatctatgatgaaactgatattcctcacaactcagaaaccatccccagcgcccctttggcatctccagagcaggagatagagcactatgacattgacaacgccagcagcatcgccccttcggatgcagacatcattcaacactacaagcagttccgcagccacacaccaaaattttcaatccagaggcacagtcccctaggctttgcaaggcaatcccccatgcccttaggagcaagcagtttgacttaccagccttcatatggtcaaggtttgagaaccagctccctaagccactcagcatgcccaactcccaaccctctgtctcgacacagtccagcccctttctccaaatcttctacgttctatagaaacagcccagcaagggaattgcatcttcctataagggatggtaatactttggaaatgcatggtgacacctgccaacctggcattttcaactatgccacaaggctgggaaggagaagcaagagtcctcaggccatggcatcacatggttctagaccagggagtcgcctaaagcagccgattgggcagattccactggaatcttctcctccagtcggactttctattgaagaagtggagaggctcaacacacctcgccctagaaacccaagtatctgcagtgcagaccatgggaggtcttcttcagaggaggactgcagaaggccactgtctagaacaaggaatccagcggatggcattccagctccagaatcctcttctgatagtgactcccatgaatctttcacttgctcagaaatggaatatgacagggagaagccaatggtatatacttccaggatgcccaaattatctcaagtcaatgaatctgatgcagatgatgaagataattatggagccagactgaagcctcgaaggtaccacggtcgcagggccgagggaggacctgtgggcacccaggcagcagcaccaggcactgctgacaacacactgcccatgaagctagggcagcaagcagggactttcaactgggacaaccttttgaactggggccctggctttggccattatgtagatgtttttaaagatttggcatctcttccagaaaaagcagcagcaaatgaagaaggcaaagctgggacaactaaaccagtccccaaagatggggaagcagaacagtatgtgtgaagtttatgtactggcactataaaatataaaaacaagaaataatactcaaaccattgtaaagttgctgactaggttgggtcacatttgaaaaacaggccagtatggactagtggtggagggaaaactttaaaaataataaccacaatgctgctgaaacagactcacaacaactcttaatttaaacatgtgtggttgaatttatttccctgcatgcattgtgttttgtaactagttatgtggcatgcagcatttggaaaatttttcttatttaccagtgtttgatttgtgatttttaaaaattgatacctttaccattgcagaaaagaacttgtgctttcccagtggcgtatgtgtattgtttcaactgtattattataattatattttgcattgcaagattcttgatgttaaaccaatccttgtaaagtgtaaaaaggaaccctcctatcgtggaatgaaagattaagtatattaacacttttcagaatgatagtttctgtatttgatgttgctcagaaatgtctcagtatttgagtaagttttacatgacagtgggtactgaaattaagtcattttgttcagcactttaacgctttcttatagaattgtcttaaaacttctggatccttgagcaaatgattatagtctcctgactttcatgaggcttccattaggaacagaatgattgcatgttgtccccagaacactgccaccttgctatgcgaatgatgttctcagcagcacttctaagaaacactcttaaaagttatttattgaaaatttttcgtatgcttttaatattttaaagaattgacctaaggaaagcttatgattggacttattttccaaccagataacatttactctaagtacccagtttttataatttatatgaaatcagatttcaacacttactttgtcattttgtagatcattttttttaaatactgtgtaaaaactttttttacacctaagctgtgtttttgatactgatattttcctatgctgaatagttttcttactttcagggaaggtaagaaaatacttttttatatttgttacttatgtaacattcatatttttctcattttgatatttgtaacatactgtatgctttctacttgtaaatgtcaacaatagaattaaaatatttatttaaaataaaaaaaaaaaaaaaaaaaa

SEQ ID NO: 133 - DNA, 6645 bp, Homo sapiens
  CDS (1)...(6645)
atggtggctaattttttcaagagcttgattttaccttacattcataagctttgcaaaggaatgtttacaaagaaattgggaaatacaaacaaaaacaaagagtatcgtcagcagaaaaaggatcaagacttccccactgctggccagaccaaatcccccaaattttcttacacttttaaaagcactgtaaagaagattgcaaagtgttcatccactcacaacttatccactgaggaagacgaggccagtaaagagttttccctctcaccaacattcagttaccgagtagctattgccaatggcctacaaaagaatgctaaagtaaccaacagtgataatgaggatctgcttcaagagctctcttcaatcgagagttcctactcagaatcattaaatgaactaaggagtagcacagaaaaccaggcacaatcaacacacacaatgccagttagacgcaacagaaagagttcaagcagccttgcaccctctgagggcagctctgacggggagcgtactctacatggcttaaaactgggagctttacgaaaactgagaaaatggaaaaagagtcaagaatgtgtctcctcagactcagagttaagcaccatgaaaaaatcctggggaataagaagtaagtctttggacagaactgtccgaaacccaaagacaaatgccctggagccagggttcagttcctctggctgcattagccaaacacatgatgtcatggaaatgatctttaaggaacttcagggaataagtcagattgaaacagaactttctgaactacgagggcacgtcaatgctctcaagcactccatcgatgagatctccagcagtgtggaggttgtacaaagtgaaattgagcagttgcgcacagggtttgtccagtctcggagggaaactagagacatccatgattatattaagcacttaggtcatatgggtagcaaggcaagcctgagatttttaaatgtgactgaagaaagatttgaatatgttgaaagcgtggtgtaccaaattctaatagataaaatgggtttttcagatgcaccaaatgctattaaaattgaatttgctcagaggataggacaccagagagactgcccaaatgcaaagcctcgacccatacttgtgtactttgaaacccctcaacaaagggattctgtcttaaaaaagtcatataaactcaaaggaacaggcattggaatctcaacagatattctaactcatgacatcagagaaagaaaagagaaagggataccatcctcccagacatatgagagcatggctataaagttgtctactccagagccaaaaatcaagaagaacaattggcagtcacctgatgacagtgatgaagatcttgaatctgacctcaatagaaacagttacgctgtgctttccaagtcagagcttctaacaaagggaagtacttccaagccaagctcaaaatcacacagtgctagatccaagaataaaactgctaatagcagcagaatttcaaataaatcagattatgataaaatctcctcacagttgccagaatcagatatcttggaaaagcaaaccacaacccattatgcagatgcaacacctctctggcactcacagagtgattttttcactgctaaacttagtcgttctgaatcagatttttccaaattgtgtcagtcttactcagaagatttttcagaaaatcagtttttcactagaactaatggaagctctctcctgtcatcttcggaccgggagctatggcagaggaaacaggaaggaacagcgaccctgtatgacagtcccaaggaccagcatttgaatggaagtgttcagggtatccaagggcagactgaaactgaaaacacagaaactgtggatagtggaatgagtaatggcatggtgtgtgcatctggagaccggagtcattacagtgattctcagctctctttacatgaggatctttctccatggaaggaatggaatcaaggagctgatttaggcttggattcatccacccaggaaggttttgattatgaaacaaacagtctttttgaccaacagcttgatgtttacaataaagacctagaatacttgggaaagtgccacagtgatcttcaagatgactcagagagctacgacttaactcaagatgacaattcttctccatgccctggcttggataatgaaccacaaggccagtgggttggccaatatgattcttatcagggagctaattctaatgagctataccaaaatcaaaaccagttgtccatgatgtatcgaagtcaaagtgaattgcaaagtgatgattcagaggatgccccacccaaatcatggcatagtcgattaagcattgacctttctgataagactttcagcttcccaaaatttggatctacactgcagagggctaaatcagccttggaagtagtatggaacaaaagcacacagagtctgagtgggtatgaggacagtggctcttcattaatggggagatttcggacattatctcaatcaactgcaaatgagtcaagtaccacacttgactctgatgtctacacggagccctattactataaagcagaggatgaggaagattatactgaaccagtggctgacaatgaaacagattatgttgaagtcatggaacaagtccttgctaaactagaaaacaggactagtattactgaaacagatgaacaaatgcaagcatatgatcacctttcatatgaaacaccttatgaaaccccacaagatgagggttatgatggtccagcagatgatatggttagtgaagaggggttagaacccttaaatgaaacatcagctgagatggaaataagagaagatgaaaaccaaaacattcctgaacagccagtggagatcacaaagccaaagagaattcgtccttctttcaaagaagcagctttaagggcctataaaaagcaaatggcagagttggaagagaagatcttggctggagatagcagttctgtggatgaaaaggctcgaatagtaagtggcaatgatttggatgcttccaaattttctgcactccaggtgtgtggtggggctggaggtggactttatggtattgacagcatgccggatcttcgcagaaaaaaaactttgcctattgtccgagatgtggccatgaccctggctgcccggaaatctggactctccctggctatggtgattaggacatccctaaataatgaggaactgaaaatgyacgtcttcaagaagaccttgcaggcactgatctaccctatgtcttctaccatcccacacaattttgaggtctggacggctaccacacccacctactgttatgagtgtgaagggctcctgtggggcattgcaaggcaaggcatgaagtgtctggagtgtggagtgaaatgccacgaaaagtgtcaggacctgctaaacgctgactgcttgcagagagcagcagaaaagagttctaaacatggtgccgaagacaagactcagaccattattacagcaatgaaagaaagaatgaagatcagggagaaaaaccggccagaagtatttgaagtaatccaggaaatgtttcagatttctaaagaagattttgtgcagtttacaaaggcggccaaacagagtgtactggatgggacatctaagtggtctgcaaaaataaccattacagtggtttctgcacagggtctacaggcaaaagataaaacagggtctagtgatccatatgttacagttcaagttggaaagaacaaaagaagaacaaaaaccatttttggaaatttgaatccagtatgggatgagaagttttattttgagtgtcataactccacagatcgaatcaaagtcagagtatgggatgaagatgatgatattaaatccagagtcaagcaacatttcaaaaaggagtcagatgattttctgggacaaacaattgtagaagtgaggaccttgagtggagaaatggatgtctggtacaacttagagaaaaggacagataagtcagctgtatctggggccatacgattgaaaatcaatgtggagataaaaggagaagagaaggttgctccatatcatattcaatatacatgtttacatgagaatctgttccattacttgactgaagtgaaatctaatggtggagtgaaaatcccagaagtcaaaggggatgaagcctggaaggttttctttgatgatgcttcccaagaaatagttgatgaatttgctatgcgttatggaattgaatccatttatcaagctatgacgcacttttcatgtctgtcttctaaatacatgtgccccggtgtccctgccgtcatgagcaccttgctggctaatataaatgctttttatgctcacacaacagtttcaacaaacatacaggtttctgcctcagatcgatttgctgctaccaactttggtagggaaaaattcataaaactactggaccagttacataactctttgaggattgatctgtcaaagtatagggaaaactttcctgcaagcaatactgaaagactgcaagacctgaaatcaactgttgacctgttaacaagtatcaccttttttaggatgaaggttctggagctgcaaagccccccaaaagcgagcatggtggtgaaggactgtgtaagggcttgcctggattctacatacaagtatatttttgacaactgccatgaactctactcccagctaacagacccgagtaagaaacaggatattcctcgtgaagatcagggaccaaccaccaagaatttggatttttggccccaacttattacactgatggttactattattgatgaggataaaactgcctacacacctgtcctgaatcagtttcctcaagagctgaacatgggaaaaataagtgccgaaattatgtggactctttttgctctggatatgaaatatgcattagaagaacatgaaaatcagcggttatgcaagagcaccgattatatgaatttgcatttcaaagttaaatggttttataatgaatatgtgcgtgaacttcctgccttcaaggatgctgttcctgaatactccttgtggtttgaaccttttgtcatgcaatggctagatgaaaacgaagatgtgtcaatggaattccttcatggagcactgggaagagacaaaaaagatggattccagcagacatctgagcatgctctcttttcttgctccgtggttgatgtctttgctcagctgaatcagagctttgaaattattaagaaactggaatgccctaatcctgaagcattatctcacttaatgagaagatttgcaaagactatcaataaagtgctgctccagtatgctgcaattgtatcaagtgatttcagttcacattgtgataaggaaaatgtgccctgtatcttgatgaacaatattcaacaattgcgggtccagctggaaaaaatgtttgaatccatgggagggaaggagctagattctgaagctagtactattctaaaagaacttcaggttaagctcagtggggtcctggatgagctcagcgtcacttatggtgaaagtttccaggttataattgaagagtgtataaaacagatgagtttcgaactaaatcaaatgagagcaaatggaaacaccacatctaataagaacagtgcagcaatggatgcagagattgtgttaagatctcttatggattttttggacaaaacattaagtctctcagcaaaaatctgtgagaaaacagtcctaaagcgagttttaaaagagttatggaagctagttctcaacaaaatagaaaaacaaattgttcttcctcctctgacagatcaaacaggaccccagatgattttcattgcagctaaagatcttggacagttatccaaactgaaggagcacatgattcgagaggatgccaggggtctgacgccaagacaatgtgctataatggaggtagtcctggctaccatcaagcaatactttcatgcaggaggaaatggcctgaaaaagaatttcttggagaaaagcccagatcttcagtctctgagatatgctctcagtctttatacccaaactactgatgccttgataaagaaattcatagatactcaaacctcacagagtcgttcctccaaagatgccgtgggtcagatatctgttcatgtggacatcactgccaccccaggaacgggagatcataaagtcactgtaaaagtgattgctattaatgacctaaactggcagaccacagcaatgttccgcccctttgtggaagtttgtatactgggacccaaccttggagacaagaagagaaaacaaggcacaaaaacaaaaagcaacacatggtcaccaaagtacaatgaaacatttcagttcattctcggaaaggaaaatcggccaggggcttatgaacttcatctctcagttaaggattactgctttgccagagaagatcgaattatcggaatgacagtcattcagctacagaacatagcagaaaagggaagctatggggcatggtatcctcttctgaaaaatatctctatggatgaaactggtttgactatccttagaatactctctcagaggaccagtgatgatgtggctaaagaatttgtaagacttaaatctgaaacaagatctactgaagagagtgcttga

SEQ ID NO: 134 - protein, 2214 aa, Homo sapiens
  VARIANT (1)...(2214): Xaa = Any Amino Acid
MVANFFKSLILPYIHKLCKGMFTKKLGNTNKNKEYRQQKKDQDFPTAGQTKSPKFSYTFKSTVKKIAKCSSTHNLSTEEDEASKEFSLSPTFSYRVAIANGLQKNAKVTNSDNEDLLQELSSIESSYSESLNELRSSTENQAQSTHTMPVRRNRKSSSSLAPSEGSSDGERTLHGLKLGALRKLRKWKKSQECVSSDSELSTMKKSWGIRSKSLDRTVRNPKTNALEPGFSSSGCISQTHDVMEMIFKELQGISQIETELSELRGHVNALKHSIDEISSSVEVVQSEIEQLRTGFVQSRRETRDIHDYIKHLGHMGSKASLRFLNVTEERFEYVESVVYQILIDKMGFSDAPNAIKIEFAQRIGHQRDCPNAKPRPILVYFETPQQRDSVLKKSYKLKGTGIGISTDILTHDIRERKEKGIPSSQTYESMAIKLSTPEPKIKKNNWQSPDDSDEDLESDLNRNSYAVLSKSELLTKGSTSKPSSKSHSARSKNKTANSSRISNKSDYDKISSQLPESDILEKQTTTHYADATPLWHSQSDFFTAKLSRSESDFSKLCQSYSEDFSENQFFTRTNGSSLLSSSDRELWQRKQEGTATLYDSPKDQHLNGSVQGIQGQTETENTETVDSGMSNGMVCASGDRSHYSDSQLSLHEDLSPWKEWNQGADLGLDSSTQEGFDYETNSLFDQQLDVYNKDLEYLGKCHSDLQDDSESYDLTQDDNSSPCPGLDNEPQGQWVGQYDSYQGANSNELYQNQNQLSMMYRSQSELQSDDSEDAPPKSWHSRLSIDLSDKTFSFPKFGSTLQRAKSALEVVWNKSTQSLSGYEDSGSSLMGRFRTLSQSTANESSTTLDSDVYTEPYYYKAEDEEDYTEPVADNETDYVEVMEQVLAKLENRTSITETDEQMQAYDHLSYETPYETPQDEGYDGPADDMVSEEGLEPLNETSAEMEIREDENQNIPEQPVEITKPKRIRPSFKEAALRAYKKQMAELEEKILAGDSSSVDEKARIVSGNDLDASKFSALQVCGGAGGGLYGIDSMPDLRRKKTLPIVRDVAMTLAARKSGLSLAMVIRTSLNNEELKMXVFKKTLQALIYPMSSTIPHNFEVWTATTPTYCYECEGLLWGIARQGMKCLECGVKCHEKCQDLLNADCLQRAAEKSSKHGAEDKTQTIITAMKERMKIREKNRPEVFEVIQEMFQISKEDFVQFTKAAKQSVLDGTSKWSAKITITVVSAQGLQAKDKTGSSDPYVTVQVGKNKRRTKTIFGNLNPVWDEKFYFECHNSTDRIKVRVWDEDDDIKSRVKQHFKKESDDFLGQTIVEVRTLSGEMDVWYNLEKRTDKSAVSGAIRLKINVEIKGEEKVAPYHIQYTCLHENLFHYLTEVKSNGGVKIPEVKGDEAWKVFFDDASQEIVDEFAMRYGIESIYQAMTHFSCLSSKYMCPGVPAVMSTLLANINAFYAHTTVSTNIQVSASDRFAATNFGREKFIKLLDQLHNSLRIDLSKYRENFPASNTERLQDLKSTVDLLTSITFFRMKVLELQSPPKASMVVKDCVRACLDSTYKYIFDNCHELYSQLTDPSKKQDIPREDQGPTTKNLDFWPQLITLMVTIIDEDKTAYTPVLNQFPQELNMGKISAEIMWTLFALDMKYALEEHENQRLCKSTDYMNLHFKVKWFYNEYVRELPAFKDAVPEYSLWFEPFVMQWLDENEDVSMEFLHGALGRDKKDGFQQTSEHALFSCSVVDVFAQLNQSFEIIKKLECPNPEALSHLMRRFAKTINKVLLQYAAIVSSDFSSHCDKENVPCILMNNIQQLRVQLEKMFESMGGKELDSEASTILKELQVKLSGVLDELSVTYGESFQVIIEECIKQMSFELNQMRANGNTTSNKNSAAMDAEIVLRSLMDFLDKTLSLSAKICEKTVLKRVLKELWKLVLNKIEKQIVLPPLTDQTGPQMIFIAAKDLGQLSKLKEHMIREDARGLTPRQCAIMEVVLATIKQYFHAGGNGLKKNFLEKSPDLQSLRYALSLYTQTTDALIKKFIDTQTSQSRSSKDAVGQISVHVDITATPGTGDHKVTVKVIAINDLNWQTTAMFRPFVEVCILGPNLGDKKRKQGTKTKSNTWSPKYNETFQFILGKENRPGAYELHLSVKDYCFAREDRIIGMTVIQLQNIAEKGSYGAWYPLLKNISMDETGLTILRILSQRTSDDVAKEFVRLKSETRSTEESA

SEQ ID NO: 135 - DNA, 5112 bp, Homo sapiens
  CDS (1)...(5112)
atgtctctgctttgcgttggagtcaaaaaagccaagtttgatggtgcccaagagaaattcaacacgtacgtgaccctgaaagtgcagaatgtcaagagcacgaccatcgcggtgcggggcagccagcccagctgggagcaggatttcatgttcgagattaaccgtctggatttgggactgacggtggaggtgtggaataagggtctcatctgggacacaatggtgggcactgtgtggatcccactgaggaccatccgccagtccaatgaggagggccctggagagtggctgacgctggactcccaggtcatcatggcagacagtgagatctgtggcaccaaggaccccaccttccaccgcatcctcctggacacgcgctttgagctacccttagacattcctgaagaggaggctcgctactgggccaagaagctggagcagctcaatgctatgcgggaccaggatgaatattccttccaagatgagcaagacaagcctctgcctgtccccagcaaccagtgctgcaactggaattattttggctggggtgagcagcacaacgatgaccccgacagtgcagtggatgatcgtgacagtgactaccgcagtgaaacgagcaacagcatcccgccgccctattatactacgtcacaacccaacgcctcagtccaccaatattctgttcgcccaccacccctgggctcccgggagtcctacagtgactccatgcacagttacgaggagttctctgagccacaagccctcagccccacgggtagcagccgctatgcctcttccggggagctgagccagggaagctctcagctgagcgaggacttcgaccctgacgagcacagcctgcagggctccgacatggaggatgagcgggaccgggactcctaccactcctgccacagctcggtcagctaccacaaagactcgcctcgctgggaccaggatgaggaagagctggaggaggacctggaggacttcctggaggaggaggagctgcctgaagatgaggaggagctggaggaggaggaggaggaggtgcctgacgatttgggcagctatrcccagcgtgaagacgtagctgtggctgagcccaaagacttcaaacgcatcagcctcccgccagctgccccagggaaggaggacaaggccccagtggcacccaccgaggcccccgacatggccaaggtggcccccaagccagccacgcccgacaaggtgcctgcagctgagcagatccctgaggctgagccacccaaggacgaggagagtttcaggccgagagaggatgaggaaggccaggaggggcaggactccatgtccagggccaaggccaactggctgcgtgccttcaacaaggtgcggatgcagctgcaggaggcccggggagaaggagagatgtctaaatccctatggttcaaaggcggcccagggggcggtctcatcatcatcgacagcatgccagacatccgcaagaggaaacctatcccactcgtgagcgacttggccatgtccctggtccagtccaggaaagcgggcatcacctcggccttggcctccagcacgttgaacaacgaggagctgaaaaaccacgtttacaagaagaccctgcaagccttaatctaccccatctcgtgcacgacgccacacaacttcgaagtgtggacggccaccacgcccacctactgctacgagtgcgaggggctgctgtggggcatcgcgaggcagggcatgcgctgcaccgagtgcggtgtcaagtgccacgagaagtgccaggacctgctcaacgccgactgcctgcagcgggctgcggagaagagctccaagcacggggcggaggaccggacacagaacatcatcatggtgctcaaggaccgcatgaagatccgggagcgcaacaagcccgagatcttcgagctcatccaggagatcttcgcggtgaccaagacggcgcacacgcagcagatgaaggcggtcaagcagagcgtgctggacggcacgtccaagtggtccgccaagatcagcatcaccgtggtctgcgcccagggcttgcaggcaaaggacaagacaggatccagtgacccctatgtcaccgtccaggtcgggaagaccaagaaacggacaaaaaccatctatgggaacctcaacccggtgtgggaggagaatttccactttgaatgtcacaattcctccgaccgcatcaaggtgcgcgtctgggacgaggatgacgacatcaaatcccgcgtgaaacagaggttcaagagggaatctgacgatttcctggggcagacgatcattgaggtgcggacgctcagcggcgagatggacgtgtggtacaacctggacaagcgaactgacaaatctgccgtgtcgggtgccatccggctccacatcagtgtggagatcaaaggcgaggagaaggtggccccgtaccatgtccagtacacctgtctgcatgagaacctgttccacttcgtgaccgacgtgcagaacaatggggtcgtgaagatcccagatgccaagggtgacgatgcctggaaggtttactacgatgagacagcccaggagattgtggacgagtttgccatgcgctacggcgtcgagtccatctaccaagccatgacccactttgcctgcctctcctccaagtatatgtgcccaggggtgcctgccgtcatgagcaccctgctcgccaacatcaatgcctactacgcacacaccaccgcctccaccaacgtgtctgcctccgaccgcttcgccgcctccaactttgggaaagagcgcttcgtgaaactcctggaccagctgcataactccctgcggattgacctctccatgtaccggaataacttcccagccagcagcccggagagactccaggacctcaaatccactgtggaccttctcaccagcatcaccttctttcggatgaaggtacaagaactccagagcccgccccgagccagccaggtggtaaaggactgtgtgaaagcctgccttaattctacctacgagtacatcttcaataactgccatgaactgtacagccgggagtaccagacagacccggccaagaagggggaagttcccccagaggaacaggggcccagcatcaagaacctcgacttctggtccaagctgattaccctcatagtgtccatcattgaggaagacaagaattcctacactccctgcctcaaccagtttccccaggagctgaatgtgggtaaaatcagcgctgaagtgatgtggaatctgtttgcccaagacatgaagtacgccatggaggagcacgacaagcatcgtctatgcaagagtgccgactacatgaacctccacttcaaggtgaaatggctctacaatgagtatgtgacggaacttcccgccttcaaggaccgcgtgcctgagtaccctgcatggtttgaacccttcgtcatccagtggctggatgagaatgaggaggtgtcccgggatttcctgcacggtgccctggagcgagacaagaaggatgggttccagcagacctcagagcatgccctattctcctgctccgtggtggatgttttctcccaactcaaccagagctttgaaatcatcaagaaactcgagtgtcccgaccctcagatcgtggggcactacatgaggcgctttgccaagaccatcagtaatgtgctcctccagtatgcagacatcatctccaaggactttgcctcctactgctccaaggagaaggagaaagtgccctgcattctcatgaataacactcaacagctacgagttcagctggagaagatgttcgaagccatgggaggaaaggagctggatgctgaagccagtgacatcctgaaggagcttcaggtgaaactcaataacgtcttggatgagctcagccgggtgtttgctaccagcttccagccgcacattgaagagtgtgtcaaacagatgggtgacatccttagccaggttaagggcacaggcaatgtgccagccagtgcctgcagcagcgtggcccaggacgcggacaatgtgttgcagcccatcatggacctgctggacagcaacctgaccctctttgccaaaatctgtgagaagactgtgctgaagcgagtgctgaaggagctgtggaagctggttatgaacaccatggagaaaaccatcgtcctgccgcccctcactgaccagacgatgatcgggaacctcttgagaaaacatggcaagggattagaaaagggcagggtgaaattgccaagccactcagacggaacccagatgatcttcaatgcagccaaggagctgggtcagctgtccaaactcaaggatcacatggtacgagaagaagccaagagcttgaccccaaagcagtgcgcggttgttgagttggccctggacaccatcaagcaatatttccacgcgggtggcgtgggcctcaagaagaccttcctggagaagagcccggacctgcaatccttgcgctatgccctgtcgctctacacgcaggccaccgacctgctaatcaagacctttgtacagacgcaatcggcccagggcttgggtgtagaagaccctgtgggtgaagtctctgtccatgttgagctgttcactcatccaggaactggggaacacaaggtcacagtgaaagtggtggctgccaatgacctcaagtggcagacttctggcatcttccggccgttcatcgaggtcaacatcattgggccccagctcagcgacaagaaacgcaagtttgcgaccaaatccaagaacaatagctgggctcccaagtacaatgagagcttccagttcacgctgagcgccgacgcgggtcccgagtgctatgagctgcaggtgtgcgtcaaggactactgcttcgcgcgcgaggaccgcacggtggggctggccgtgctgcagctgcgtgagctggcccagcgcgggagcgccgcctgctggctgccgctcggccgccgcatccacatggacgacacgggcctcacggtgctgcgaatcctctcgcagcgcagcaacgacgaggtggccaaggagttcgtgaagctcaagtcggacacgcgctccgccgaggagggcggtgccgcgcctgcgccttag

SEQ ID NO: 136 - protein, 1703 aa, Homo sapiens
  VARIANT (1)...(1703): Xaa = Any Amino Acid
MSLLCVGVKKAKFDGAQEKFNTYVTLKVQNVKSTTIAVRGSQPSWEQDFMFEINRLDLGLTVEVWNKGLIWDTMVGTVWIPLRTIRQSNEEGPGEWLTLDSQVIMADSEICGTKDPTFHRILLDTRFELPLDIPEEEARYWAKKLEQLNAMRDQDEYSFQDEQDKPLPVPSNQCCNWNYFGWGEQHNDDPDSAVDDRDSDYRSETSNSIPPPYYTTSQPNASVHQYSVRPPPLGSRESYSDSMHSYEEFSEPQALSPTGSSRYASSGELSQGSSQLSEDFDPDEHSLQGSDMEDERDRDSYHSCHSSVSYHKDSPRWDQDEEELEEDLEDFLEEEELPEDEEELEEEEEEVPDDLGSYXQREDVAVAEPKDFKRISLPPAAPGKEDKAPVAPTEAPDMAKVAPKPATPDKVPAAEQIPEAEPPKDEESFRPREDEEGQEGQDSMSRAKANWLRAFNKVRMQLQEARGEGEMSKSLWFKGGPGGGLIIIDSMPDIRKRKPIPLVSDLAMSLVQSRKAGITSALASSTLNNEELKNHVYKKTLQALIYPISCTTPHNFEVWTATTPTYCYECEGLLWGIARQGMRCTECGVKCHEKCQDLLNADCLQRAAEKSSKHGAEDRTQNIIMVLKDRMKIRERNKPEIFELIQEIFAVTKTAHTQQMKAVKQSVLDGTSKWSAKISITVVCAQGLQAKDKTGSSDPYVTVQVGKTKKRTKTIYGNLNPVWEENFHFECHNSSDRIKVRVWDEDDDIKSRVKQRFKRESDDFLGQTIIEVRTLSGEMDVWYNLDKRTDKSAVSGAIRLHISVEIKGEEKVAPYHVQYTCLHENLFHFVTDVQNNGVVKIPDAKGDDAWKVYYDETAQEIVDEFAMRYGVESIYQAMTHFACLSSKYMCPGVPAVMSTLLANINAYYAHTTASTNVSASDRFAASNFGKERFVKLLDQLHNSLRIDLSMYRNNFPASSPERLQDLKSTVDLLTSITFFRMKVQELQSPPRASQVVKDCVKACLNSTYEYIFNNCHELYSREYQTDPAKKGEVPPEEQGPSIKNLDFWSKLITLIVSIIEEDKNSYTPCLNQFPQELNVGKISAEVMWNLFAQDMKYAMEEHDKHRLCKSADYMNLHFKVKWLYNEYVTELPAFKDRVPEYPAWFEPFVIQWLDENEEVSRDFLHGALERDKKDGFQQTSEHALFSCSVVDVFSQLNQSFEIIKKLECPDPQIVGHYMRRFAKTISNVLLQYADIISKDFASYCSKEKEKVPCILMNNTQQLRVQLEKMFEAMGGKELDAEASDILKELQVKLNNVLDELSRVFATSFQPHIEECVKQMGDILSQVKGTGNVPASACSSVAQDADNVLQPIMDLLDSNLTLFAKICEKTVLKRVLKELWKLVMNTMEKTIVLPPLTDQTMIGNLLRKHGKGLEKGRVKLPSHSDGTQMIFNAAKELGQLSKLKDHMVREEAKSLTPKQCAVVELALDTIKQYFHAGGVGLKKTFLEKSPDLQSLRYALSLYTQATDLLIKTFVQTQSAQGLGVEDPVGEVSVHVELFTHPGTGEHKVTVKVVAANDLKWQTSGIFRPFIEVNIIGPQLSDKKRKFATKSKNNSWAPKYNESFQFTLSADAGPECYELQVCVKDYCFAREDRTVGLAVLQLRELAQRGSAACWLPLGRRIHMDDTGLTVLRILSQRSNDEVAKEFVKLKSDTRSAEEGGAAPAP

SEQ ID NO: 137 - DNA, 6042 bp, Homo sapiens
  CDS (1)...(6042)
atggggaccctgggtcaggccagcctctttgctcctcccggaaattatttttggtctgaccactctgccttgtgttttgcagaatcatgtgagggccaaccggggaaggtggagcagatgagcacacacaggagccgtctcctcaccgccgcccctctcagcatggaacagaggcggccctggccccgggccctggaggtggacagccgctctgtggtcctgctctcagtggtctgggtgctgctggcccccccagcagccggcatgcctcagttcagcaccttccactctgagaatcgtgactggaccttcaaccacttgaccgtccaccaagggacgggggccgtctatgtgggggccatcaaccgggtctataagctgacaggcaacctgaccatccaggtggctcataagacagggccagaagaggacaacaagtcttgttacccgcccctcatcgtgcagccctgcagcgaagtgctcaccctcaccaacaatgtcaacaagctgctcatcattgactactctgagaaccgcctgctggcctgtgggagcctctaccagggggtctgcaagctgctgcggctggatgacctcttcatcctggtggagccatcccacaagaaggagcactacctgtccagtgtcaacaagacgggcaccatgtacggggtgattgtgcgctctgagggtgaggatggcaagctcttcatcggcacggctgtggatgggaagcaggattacttcccgaccctgtccagccggaagctgccccgagaccctgagtcctcagccatgctcgactatgagctacacagcgattttgtctcctctctcatcaagatcccttcagacaccctggccctggtctcccactttgacatcttctacatctacggctttgctagtgggggctttgtctactttctcactgtccagcccgagacccctgagggtgtggccatcaactccgctggagacctcttctacacctcacgcatcgtgcggctctgcaaggatgaccccaagttccactcatacgtgtccctgcccttcggctgcacccgggccggggtggaataccgcctcctgcaggctgcttacctggccaagcctggggactcactggcccaggccttcaatatcaccagccaggacgatgtactctttgccatcttctccaaagggcagaagcagtatcaccacccgcccgatgactctgccctgtgtgccttccctatccgggccatcaacttgcagatcaaggagcgcctgcagtcctgctaccagggcgagggcaacctggagctcaactggctgctggggaaggacgtccagtgcaccaaggcgcctgtccccatcgatgataacttctgtggactggacatcaaccagcccctgggaggctcaactccagtggagggcctgaccctgtacaccaccagcagggaccgcatgacctctgtggcctcctacgtttacaacggctacagcgtggtttttgtggggactaagagtggcaagctgaaaaagattcgggccgacggtcccccccatggtggggtccagtacgagatggtctctgtgctcaaggacggaagccccatcctccgggacatggccttctccattgatcagcgctacctgtacgtcatgtctgagagacaggtcaccagggtccccgtggagtcatgtgagcagtatacgacttgtggggagtgcctgagctctggggaccctcactgtggctggtgtgccctgcacaacatgtgctcccgcagggacaaatgccaacaggcctgggaacctaatcgatttgctgccagcatcagccagtgtgtgagccttgcagtgcatcccagcagcatctcagtatctgagcacagccggttgcttagcctggtagtgagtgatgctcctgatctatctgcgggtatcgcctgtgcctttgggaacctgacagaggtggaggggcaggtgtccgggagccaggtcatctgcatctcacctgggcccaaggatgtccctgtcatcccgctggatcaagactggtttgggctggagctacagctgaggtccaaggagacagggaagatatttgtcagcaccgagttcaagttttacaactgcagtgcccaccaactgtgcctgtcctgtgtcaacagcgccttccgctgccattggtgcaagtaccgcaacctctgcactcatgaccccaccacctgctccttccaggagggccggatcaatatttcagaggactgtccccagctggtgcccacagaggagatcttgattccagtcggggaggtaaagccaatcacccttaaggcgcgaaatctgccccagccgcagtccggccagcgaggctatgagtgtgtcctcaacatacaaggagccatccaccgggtccccgctctgcgcttcaacagctccagcgttcagtgtcagaacagctcgtaccagtatgatggcatggacatcagcaatctggccgtggatttcgctgtggtgtggaacggcaatttcatcattgacaaccctcaggacctgaaagtccatctctacaagtgtgcagcccagcgggagagctgcggcctctgcctcaaggccgaccggaagtttgagtgtggctggtgcagcggcgagcgcaggtgcaccctccaccagcactgtaccagcccttccagcccctggctcgactggtccagccacaatgtcaagtgctccaaccctcaaatcaccgagattttgacggtgtctggaccgccggaaggagggacgcgagtgaccatccatggcgtgaacctgggtctggacttctccgagatcgcccaccatgtgcaggtggctggggtgccctgcacgcccctcccaggggaatacatcatcgctgagcagattgtctgtgagatgggccatgccctcgtgggaaccacctccgggccagtacgcctgtgtattggcgagtgtaagccagagttcatgacgaagtcccatcagcagtacaccttcgtgaacccttctgtgctgtcactcaacccaatccgaggtcccgagtcaggaggcactatggtgaccattaccggccattaccttggggctgggagcagcgtggcagtctacctgggcaaccagacctgcgagttctacgggaggtcaatgagtgagatcgtgtgtgtctcacccccatcatccaatggccttggcccggtccctgtttctgtgagtgtcgaccgagcccatgtggatagcaacctgcagtttgagtacatagatgaccctcgggtccagcgcatcgagccagagtggagcattgccagtggccacacacccctgaccatcacaggcttcaacctggatgtcattcaggagccaaggatccgagtcaaattcaatggcaaagaatctgtcaatgtgtgtaaagttgtgaacacaaccaccctcacctgcctggcaccctctctgaccacggactaccgccctggcctggacactgtggaacgcccagatgagtttggatttgtctttaacaatgtccaatccttgctaatttacaacgacaccaagtttatctactaccccaacccgacctttgaactgcttagccctactggagtcttggatcaaaagccaggatcgcccatcattctgaagggcaaaaacctctgccctcctgcctctggaggggccaaactcaactacactgtgctcatcggagagaccccttgtgctgtcaccgtatctgagacccagcttctctgcgagcctcccaacctcaccgggcagcacaaggtcatggttcacgtgggcgggatggtgttctcgcctggctcggtgagtgtcatctcagacagcttgctgaccctgccagccatcgtcagcatcgcggccggcggcagcctcctcctcatcatcgtcatcatcgtcctcattgcctacaagcgcaagtctcgagaaaatgacctcactctcaagcggctgcaaatgcagatggacaatctggagtcccgtgtggccttggagtgcaaggaagcttttgctgagctccagacggatatcaatgagttgaccagtgacctggaccgctcaggaatcccttacctggactatcgtacctacgctatgcgagtcctgttcccgggcatcgaggaccaccccgtcctgcgggagctggaggtacaaggaaacgggcagcagcacgtggagaaggccctgaagctctttgcccagctcatcaacaacaaggtgttcctgctgaccttcatccgcaccctggagctgcagcgcagtttctccatgcgcgaccggggcaacgtggcttcgctcatcatgaccggcctgcagggccgcctggaatatgccactgatgtcctcaagcagctgctctctgacctcatcgataagaacctggagaacaagaaccaccccaagctgctactccggaggacagagtctgtggctgaaaagatgctgaccaattggttcgccttcctcctgcacaagttcctaaaggagtgcgcaggggagccactcttcatgctatactgtgccatcaagcagcagatggagaagggccccattgatgccatcacgggcgaggcccgctactccctgagcgaggacaagctcatccggcagcagatcgagtacaagaccctgatcctgaactgcgtcaaccctgacaacgagaacagtccagagatcccagtgaaggtgttaaactgtgacaccatcacacaggtcaaggagaagattcttgatgccgtgtataagaatgtgccctattcccagcggccgagggcagtggacatggacttggagtggcgccaaggccggatcgcccgggtcgtgctgcaagatgaggacatcaccaccaagattgagggtgactggaagcggctcaacacactgatgcattatcaggtgtcagacaggtcggtggtggctctggtccccaaacagacctcctcctacaacatccctgcctctgccagcatctcccggacgtccatcagcagatatgactcctccttcaggtatacgggcagccccgacagcctgcggtcccgggccccgatgatcaccccagacctggaaagtggggtcaaggtgtggcatctggtgaagaaccatgaccacggtgaccagaaggagggtgaccggggcagcaagatggtgtccgagatctacctgacccggctactggccaccaagactctcctggtcctgctgtgctcctgccaggaggcacccagtcctccagcttgttcctcggacactgtttccggactggcttgcagcctgtgccccctcattcacccatgggaagcccggacccggggcacttcctgtcttcctgtcaaagaccctgagcctacaccctgtgtggaatgtggaatgtggctgcagggcaccctgcagaagtttgtggacgacttgtttgagaccttgttcagcactgtgcaccggggcagcgctctccccctggccatcaagtacatgtttgatttcctagatgagcaggcagacaggcacagcatccatgacacagatgtgcggcacacctggaaaagcaactgcctccctctgcgcttctgggtgaacgtgattaagaacccccagttcgtgtttgacatccacaagggcagcatcacggacgcctgcctctctgtggtggcccagaccttcatggactcttgttcaacgtcagagcaccggctgggcaaggactccccctccaacaagctgctctatgccaaggacatccccagctacaagagctgggtggagagatactacgcagacatcgccaagctcccagccatcagtgaccaggacatgaatgcctacctcgccgagcagtcccgcctgcacgccgtggagttcaacatgctgagtgccctcaatgagatctactcctatgtcagcaagtatagtgaggagctcatcggggccctagagcaggatgagcaggcacggcggcagcggctggcttataaggtggagcagctcattaatgccatgtccattgagagctga

SEQ ID NO: 138 - protein, 2013 aa, Homo sapiens
MGTLGQASLFAPPGNYFWSDHSALCFAESCEGQPGKVEQMSTHRSRLLTAAPLSMEQRRPWPRALEVDSRSVVLLSVVWVLLAPPAAGMPQFSTFHSENRDWTFNHLTVHQGTGAVYVGAINRVYKLTGNLTIQVAHKTGPEEDNKSCYPPLIVQPCSEVLTLTNNVNKLLIIDYSENRLLACGSLYQGVCKLLRLDDLFILVEPSHKKEHYLSSVNKTGTMYGVIVRSEGEDGKLFIGTAVDGKQDYFPTLSSRKLPRDPESSAMLDYELHSDFVSSLIKIPSDTLALVSHFDIFYIYGFASGGFVYFLTVQPETPEGVAINSAGDLFYTSRIVRLCKDDPKFHSYVSLPFGCTRAGVEYRLLQAAYLAKPGDSLAQAFNITSQDDVLFAIFSKGQKQYHHPPDDSALCAFPIRAINLQIKERLQSCYQGEGNLELNWLLGKDVQCTKAPVPIDDNFCGLDINQPLGGSTPVEGLTLYTTSRDRMTSVASYVYNGYSVVFVGTKSGKLKKIRADGPPHGGVQYEMVSVLKDGSPILRDMAFSIDQRYLYVMSERQVTRVPVESCEQYTTCGECLSSGDPHCGWCALHNMCSRRDKCQQAWEPNRFAASISQCVSLAVHPSSISVSEHSRLLSLVVSDAPDLSAGIACAFGNLTEVEGQVSGSQVICISPGPKDVPVIPLDQDWFGLELQLRSKETGKIFVSTEFKFYNCSAHQLCLSCVNSAFRCHWCKYRNLCTHDPTTCSFQEGRINISEDCPQLVPTEEILIPVGEVKPITLKARNLPQPQSGQRGYECVLNIQGAIHRVPALRFNSSSVQCQNSSYQYDGMDISNLAVDFAVVWNGNFIIDNPQDLKVHLYKCAAQRESCGLCLKADRKFECGWCSGERRCTLHQHCTSPSSPWLDWSSHNVKCSNPQITEILTVSGPPEGGTRVTIHGVNLGLDFSEIAHHVQVAGVPCTPLPGEYIIAEQIVCEMGHALVGTTSGPVRLCIGECKPEFMTKSHQQYTFVNPSVLSLNPIRGPESGGTMVTITGHYLGAGSSVAVYLGNQTCEFYGRSMSEIVCVSPPSSNGLGPVPVSVSVDRAHVDSNLQFEYIDDPRVQRIEPEWSIASGHTPLTITGFNLDVIQEPRIRVKFNGKESVNVCKVVNTTTLTCLAPSLTTDYRPGLDTVERPDEFGFVFNNVQSLLIYNDTKFIYYPNPTFELLSPTGVLDQKPGSPIILKGKNLCPPASGGAKLNYTVLIGETPCAVTVSETQLLCEPPNLTGQHKVMVHVGGMVFSPGSVSVISDSLLTLPAIVSIAAGGSLLLIIVIIVLIAYKRKSRENDLTLKRLQMQMDNLESRVALECKEAFAELQTDINELTSDLDRSGIPYLDYRTYAMRVLFPGIEDHPVLRELEVQGNGQQHVEKALKLFAQLINNKVFLLTFIRTLELQRSFSMRDRGNVASLIMTGLQGRLEYATDVLKQLLSDLIDKNLENKNHPKLLLRRTESVAEKMLTNWFAFLLHKFLKECAGEPLFMLYCAIKQQMEKGPIDAITGEARYSLSEDKLIRQQIEYKTLILNCVNPDNENSPEIPVKVLNCDTITQVKEKILDAVYKNVPYSQRPRAVDMDLEWRQGRIARVVLQDEDITTKIEGDWKRLNTLMHYQVSDRSVVALVPKQTSSYNIPASASISRTSISRYDSSFRYTGSPDSLRSRAPMITPDLESGVKVWHLVKNHDHGDQKEGDRGSKMVSEIYLTRLLATKTLLVLLCSCQEAPSPPACSSDTVSGLACSLCPLIHPWEARTRGTSCLPVKDPEPTPCVECGMWLQGTLQKFVDDLFETLFSTVHRGSALPLAIKYMFDFLDEQADRHSIHDTDVRHTWKSNCLPLRFWVNVIKNPQFVFDIHKGSITDACLSVVAQTFMDSCSTSEHRLGKDSPSNKLLYAKDIPSYKSWVERYYADIAKLPAISDQDMNAYLAEQSRLHAVEFNMLSALNEIYSYVSKYSEELIGALEQDEQARRQRLAYKVEQLINAMSIES

SEQ ID NO: 139 - DNA, 5847 bp, Homo sapiens
  CDS (1)...(5847)
atggggaccctgggtcaggccagcctctttgctcctcccggaaattatttttggtctgaccactctgccttgtgttttgcagaatcatgtgagggccaaccggggaaggtggagcagatgagcacacacaggagccgtctcctcaccgccgcccctctcagcatggaacagaggcggccctggccccgggccctggaggtggacagccgctctgtggtcctgctctcagtggtctgggtgctgctggcccccccagcagccggcatgcctcagttcagcaccttccactctgagaatcgtgactggaccttcaaccacttgaccgtccaccaagggacgggggccgtctatgtgggggccatcaaccgggtctataagctgacaggcaacctgaccatccaggtggctcataagacagggccagaagaggacaacaagtcttgttacccgcccctcatcgtgcagccctgcagcgaagtgctcaccctcaccaacaatgtcaacaagctgctcatcattgactactctgagaaccgcctgctggcctgtgggagcctctaccagggggtctgcaagctgctgcggctggatgacctcttcatcctggtggagccatcccacaagaaggagcactacctgtccagtgtcaacaagacgggcaccatgtacggggtgattgtgcgctctgagggtgaggatggcaagctcttcatcggcacggctgtggatgggaagcaggattacttcccgaccctgtccagccggaagctgccccgagaccctgagtcctcagccatgctcgactatgagctacacagcgattttgtctcctctctcatcaagatcccttcagacaccctggccctggtctcccactttgacatcttctacatctacggctttgctagtgggggctttgtctactttctcactgtccagcccgagacccctgagggtgtggccatcaactccgctggagacctcttctacacctcacgcatcgtgcggctctgcaaggatgaccccaagttccactcatacgtgtccctgcccttcggctgcacccgggccggggtggaataccgcctcctgcaggctgcttacctggccaagcctggggactcactggcccaggccttcaatatcaccagccaggacgatgtactctttgccatcttctccaaagggcagaagcagtatcaccacccgcccgatgactctgccctgtgtgccttccctatccgggccatcaacttgcagatcaaggagcgcctgcagtcctgctaccagggcgagggcaacctggagctcaactggctgctggggaaggacgtccagtgcaccaaggcgcctgtccccatcgatgataacttctgtggactggacatcaaccagcccctgggaggctcaactccagtggagggcctgaccctgtacaccaccagcagggaccgcatgacctctgtggcctcctacgtttacaacggctacagcgtggtttttgtggggactaagagtggcaagctgaaaaagattcgggccgacggtcccccccatggtggggtccagtacgagatggtctctgtgctcaaggacggaagccccatcctccgggacatggccttctccattgatcagcgctacctgtacgtcatgtctgagagacaggtcaccagggtccccgtggagtcatgtgagcagtatacgacttgtggggagtgcctgagctctggggaccctcactgtggctggtgtgccctgcacaacatgtgctcccgcagggacaaatgccaacaggcctgggaacctaatcgatttgctgccagcatcagccagtgtgtgagccttgcagtgcatcccagcagcatctcagtatctgagcacagccggttgcttagcctggtagtgagtgatgctcctgatctatctgcgggtatcgcctgtgcctttgggaacctgacagaggtggaggggcaggtgtccgggagccaggtcatctgcatctcacctgggcccaaggatgtccctgtcatcccgctggatcaagactggtttgggctggagctacagctgaggtccaaggagacagggaagatatttgtcagcaccgagttcaagttttacaactgcagtgcccaccaactgtgcctgtcctgtgtcaacagcgccttccgctgccattggtgcaagtaccgcaacctctgcactcatgaccccaccacctgctccttccaggagggccggatcaatatttcagaggactgtccccagctggtgcccacagaggagatcttgattccagtcggggaggtaaagccaatcacccttaaggcgcgaaatctgccccagccgcagtccggccagcgaggctatgagtgtgtcctcaacatacaaggagccatccaccgggtccccgctctgcgcttcaacagctccagcgttcagtgtcagaacagctcgtaccagtatgatggcatggacatcagcaatctggccgtggatttcgctgtggtgtggaacggcaatttcatcattgacaaccctcaggacctgaaagtccatctctacaagtgtgcagcccagcgggagagctgcggcctctgcctcaaggccgaccggaagtttgagtgtggctggtgcagcggcgagcgcaggtgcaccctccaccagcactgtaccagcccttccagcccctggctcgactggtccagccacaatgtcaagtgctccaaccctcaaatcaccgagattttgacggtgtctggaccgccggaaggagggacgcgagtgaccatccatggcgtgaacctgggtctggacttctccgagatcgcccaccatgtgcaggtggctggggtgccctgcacgcccctcccaggggaatacatcatcgctgagcagattgtctgtgagatgggccatgccctcgtgggaaccacctccgggccagtacgcctgtgtattggcgagtgtaagccagagttcatgacgaagtcccatcagcagtacaccttcgtgaacccttctgtgctgtcactcaacccaatccgaggtcccgagtcaggaggcactatggtgaccattaccggccattaccttggggctgggagcagcgtggcagtctacctgggcaaccagacctgcgagttctacgggaggtcaatgagtgagatcgtgtgtgtctcacccccatcatccaatggccttggcccggtccctgtttctgtgagtgtcgaccgagcccatgtggatagcaacctgcagtttgagtacatagatgaccctcgggtccagcgcatcgagccagagtggagcattgccagtggccacacacccctgaccatcacaggcttcaacctggatgtcattcaggagccaaggatccgagtcaaattcaatggcaaagaatctgtcaatgtgtgtaaagttgtgaacacaaccaccctcacctgcctggcaccctctctgaccacggactaccgccctggcctggacactgtggaacgcccagatgagtttggatttgtctttaacaatgtccaatccttgctaatttacaacgacaccaagtttatctactaccccaacccgacctttgaactgcttagccctactggagtcttggatcaaaagccaggatcgcccatcattctgaagggcaaaaacctctgccctcctgcctctggaggggccaaactcaactacactgtgctcatcggagagaccccttgtgctgtcaccgtatctgagacccagcttctctgcgagcctcccaacctcaccgggcagcacaaggtcatggttcacgtgggcgggatggtgttctcgcctggctcggtgagtgtcatctcagacagcttgctgaccctgccagccatcgtcagcatcgcggccggcggcagcctcctcctcatcatcgtcatcatcgtcctcattgcctacaagcgcaagtctcgagaaaatgacctcactctcaagcggctgcaaatgcagatggacaatctggagtcccgtgtggccttggagtgcaaggaagcttttgctgagctccagacggatatcaatgagttgaccagtgacctggaccgctcaggaatcccttacctggactatcgtacctacgctatgcgagtcctgttcccgggcatcgaggaccaccccgtcctgcgggagctggaggtacaaggaaacgggcagcagcacgtggagaaggccctgaagctctttgcccagctcatcaacaacaaggtgttcctgctgaccttcatccgcaccctggagctgcagcgcagtttctccatgcgcgaccggggcaacgtggcttcgctcatcatgaccggcctgcagggccgcctggaatatgccactgatgtcctcaagcagctgctctctgacctcatcgataagaacctggagaacaagaaccaccccaagctgctactccggaggacagagtctgtggctgaaaagatgctgaccaattggttcgccttcctcctgcacaagttcctaaaggagtgcgcaggggagccactcttcatgctatactgtgccatcaagcagcagatggagaagggccccattgatgccatcacgggcgaggcccgctactccctgagcgaggacaagctcatccggcagcagatcgagtacaagaccctgatcctgaactgcgtcaaccctgacaacgagaacagtccagagatcccagtgaaggtgttaaactgtgacaccatcacacaggtcaaggagaagattcttgatgccgtgtataagaatgtgccctattcccagcggccgagggcagtggacatggacttggagtggcgccaaggccggatcgcccgggtcgtgctgcaagatgaggacatcaccaccaagattgagggtgactggaagcggctcaacacactgatgcattatcaggtgtcagacaggtcggtggtggctctggtccccaaacagacctcctcctacaacatccctgcctctgccagcatctcccggacgtccatcagcagatatgactcctccttcaggtatacgggcagccccgacagcctgcggtcccgggccccgatgatcaccccagacctggaaagtggggtcaaggtgtggcatctggtgaagaaccatgaccacggtgaccagaaggagggtgaccggggcagcaagatggtgtccgagatctacctgacccggctactggccaccaagggcaccctgcagaagtttgtggacgacttgtttgagaccttgttcagcactgtgcaccggggcagcgctctccccctggccatcaagtacatgtttgatttcctagatgagcaggcagacaggcacagcatccatgacacagatgtgcggcacacctggaaaagcaactgcctccctctgcgcttctgggtgaacgtgattaagaacccccagttcgtgtttgacatccacaagggcagcatcacggacgcctgcctctctgtggtggcccagaccttcatggactcttgttcaacgtcagagcaccggctgggcaaggactccccctccaacaagctgctctatgccaaggacatccccagctacaagagctgggtggagagatactacgcagacatcgccaagctcccagccatcagtgaccaggacatgaatgcctacctcgccgagcagtcccgcctgcacgccgtggagttcaacatgctgagtgccctcaatgagatctactcctatgtcagcaagtatagtgaggagctcatcggggccctagagcaggatgagcaggcacggcggcagcggctggcttataaggtggagcagctcattaatgccatgtccattgagagctga

SEQ ID NO: 140 - protein, 1948 aa, Homo sapiens
MGTLGQASLFAPPGNYFWSDHSALCFAESCEGQPGKVEQMSTHRSRLLTAAPLSMEQRRPWPRALEVDSRSVVLLSVVWVLLAPPAAGMPQFSTFHSENRDWTFNHLTVHQGTGAVYVGAINRVYKLTGNLTIQVAHKTGPEEDNKSCYPPLIVQPCSEVLTLTNNVNKLLIIDYSENRLLACGSLYQGVCKLLRLDDLFILVEPSHKKEHYLSSVNKTGTMYGVIVRSEGEDGKLFIGTAVDGKQDYFPTLSSRKLPRDPESSAMLDYELHSDFVSSLIKIPSDTLALVSHFDIFYIYGFASGGFVYFLTVQPETPEGVAINSAGDLFYTSRIVRLCKDDPKFHSYVSLPFGCTRAGVEYRLLQAAYLAKPGDSLAQAFNITSQDDVLFAIFSKGQKQYHHPPDDSALCAFPIRAINLQIKERLQSCYQGEGNLELNWLLGKDVQCTKAPVPIDDNFCGLDINQPLGGSTPVEGLTLYTTSRDRMTSVASYVYNGYSVVFVGTKSGKLKKIRADGPPHGGVQYEMVSVLKDGSPILRDMAFSIDQRYLYVMSERQVTRVPVESCEQYTTCGECLSSGDPHCGWCALHNMCSRRDKCQQAWEPNRFAASISQCVSLAVHPSSISVSEHSRLLSLVVSDAPDLSAGIACAFGNLTEVEGQVSGSQVICISPGPKDVPVIPLDQDWFGLELQLRSKETGKIFVSTEFKFYNCSAHQLCLSCVNSAFRCHWCKYRNLCTHDPTTCSFQEGRINISEDCPQLVPTEEILIPVGEVKPITLKARNLPQPQSGQRGYECVLNIQGAIHRVPALRFNSSSVQCQNSSYQYDGMDISNLAVDFAVVWNGNFIIDNPQDLKVHLYKCAAQRESCGLCLKADRKFECGWCSGERRCTLHQHCTSPSSPWLDWSSHNVKCSNPQITEILTVSGPPEGGTRVTIHGVNLGLDFSEIAHHVQVAGVPCTPLPGEYIIAEQIVCEMGHALVGTTSGPVRLCIGECKPEFMTKSHQQYTFVNPSVLSLNPIRGPESGGTMVTITGHYLGAGSSVAVYLGNQTCEFYGRSMSEIVCVSPPSSNGLGPVPVSVSVDRAHVDSNLQFEYIDDPRVQRIEPEWSIASGHTPLTITGFNLDVIQEPRIRVKFNGKESVNVCKVVNTTTLTCLAPSLTTDYRPGLDTVERPDEFGFVFNNVQSLLIYNDTKFIYYPNPTFELLSPTGVLDQKPGSPIILKGKNLCPPASGGAKLNYTVLIGETPCAVTVSETQLLCEPPNLTGQHKVMVHVGGMVFSPGSVSVISDSLLTLPAIVSIAAGGSLLLIIVIIVLIAYKRKSRENDLTLKRLQMQMDNLESRVALECKEAFAELQTDINELTSDLDRSGIPYLDYRTYAMRVLFPGIEDHPVLRELEVQGNGQQHVEKALKLFAQLINNKVFLLTFIRTLELQRSFSMRDRGNVASLIMTGLQGRLEYATDVLKQLLSDLIDKNLENKNHPKLLLRRTESVAEKMLTNWFAFLLHKFLKECAGEPLFMLYCAIKQQMEKGPIDAITGEARYSLSEDKLIRQQIEYKTLILNCVNPDNENSPEIPVKVLNCDTITQVKEKILDAVYKNVPYSQRPRAVDMDLEWRQGRIARVVLQDEDITTKIEGDWKRLNTLMHYQVSDRSVVALVPKQTSSYNIPASASISRTSISRYDSSFRYTGSPDSLRSRAPMITPDLESGVKVWHLVKNHDHGDQKEGDRGSKMVSEIYLTRLLATKGTLQKFVDDLFETLFSTVHRGSALPLAIKYMFDFLDEQADRHSIHDTDVRHTWKSNCLPLRFWVNVIKNPQFVFDIHKGSITDACLSVVAQTFMDSCSTSEHRLGKDSPSNKLLYAKDIPSYKSWVERYYADIAKLPAISDQDMNAYLAEQSRLHAVEFNMLSALNEIYSYVSKYSEELIGALEQDEQARRQRLAYKVEQLINAMSIES

SEQ ID NO: 141 - DNA, 5880 bp, Homo sapiens
  CDS (1)...(5880)
atggaacagaggcggccctggccccgggccctggaggtggacagccgctctgtggtcctgctctcagtggtctgggtgctgctggcccccccagcagccggcatgcctcagttcagcaccttccactctgagaatcgtgactggaccttcaaccacttgaccgtccaccaagggacgggggccgtctatgtgggggccatcaaccgggtctataagctgacaggcaacctgaccatccaggtggctcataagacagggccagaagaggacaacaagtcttgttacccgcccctcatcgtgcagccctgcagcgaagtgctcaccctcaccaacaatgtcaacaagctgctcatcattgactactctgagaaccgcctgctggcctgtgggagcctctaccagggggtctgcaagctgctgcggctggatgacctcttcatcctggtggagccatcccacaagaaggagcactacctgtccagtgtcaacaagacgggcaccatgtacggggtgattgtgcgctctgagggtgaggatggcaagctcttcatcggcacggctgtggatgggaagcaggattacttcccgaccctgtccagccggaagctgccccgagaccctgagtcctcagccatgctcgactatgagctacacagcgattttgtctcctctctcatcaagatcccttcagacaccctggccctggtctcccactttgacatcttctacatctacggctttgctagtgggggctttgtctactttctcactgtccagcccgagacccctgagggtgtggccatcaactccgctggagacctcttctacacctcacgcatcgtgcggctctgcaaggatgaccccaagttccactcatacgtgtccctgcccttcggctgcacccgggccggggtggaataccgcctcctgcaggctgcttacctggccaagcctggggactcactggcccaggccttcaatatcaccagccaggacgatgtactctttgccatcttctccaaagggcagaagcagtatcaccacccgcccgatgactctgccctgtgtgccttccctatccgggccatcaacttgcagatcaaggagcgcctgcagtcctgctaccagggcgagggcaacctggagctcaactggctgctggggaaggacgtccagtgcaccaaggcgcctgtccccatcgatgataacttctgtggactggacatcaaccagcccctgggaggctcaactccagtggagggcctgaccctgtacaccaccagcagggaccgcatgacctctgtggcctcctacgtttacaacggctacagcgtggtttttgtggggactaagagtggcaagctgaaaaagattcgggccgacggtcccccccatggtggggtccagtacgagatggtctctgtgctcaaggacggaagccccatcctccgggacatggccttctccattgatcagcgctacctgtacgtcatgtctgagagacaggtcaccagggtccccgtggagtcatgtgagcagtatacgacttgtggggagtgcctgagctctggggaccctcactgtggctggtgtgccctgcacaacatgtgctcccgcagggacaaatgccaacaggcctgggaacctaatcgatttgctgccagcatcagccagtgtgtgagccttgcagtgcatcccagcagcatctcagtatctgagcacagccggttgcttagcctggtagtgagtgatgctcctgatctatctgcgggtatcgcctgtgcctttgggaacctgacagaggtggaggggcaggtgtccgggagccaggtcatctgcatctcacctgggcccaaggatgtccctgtcatcccgctggatcaagactggtttgggctggagctacagctgaggtccaaggagacagggaagatatttgtcagcaccgagttcaagttttacaactgcagtgcccaccaactgtgcctgtcctgtgtcaacagcgccttccgctgccattggtgcaagtaccgcaacctctgcactcatgaccccaccacctgctccttccaggagggccggatcaatatttcagaggactgtccccagctggtgcccacagaggagatcttgattccagtcggggaggtaaagccaatcacccttaaggcgcgaaatctgccccagccgcagtccggccagcgaggctatgagtgtgtcctcaacatacaaggagccatccaccgggtccccgctctgcgcttcaacagctccagcgttcagtgtcagaacagctcgtaccagtatgatggcatggacatcagcaatctggccgtggatttcgctgtggtgtggaacggcaatttcatcattgacaaccctcaggacctgaaagtccatctctacaagtgtgcagcccagcgggagagctgcggcctctgcctcaaggccgaccggaagtttgagtgtggctggtgcagcggcgagcgcaggtgcaccctccaccagcactgtaccagcccttccagcccctggctcgactggtccagccacaatgtcaagtgctccaaccctcaaatcaccgagattttgacggtgtctggaccgccggaaggagggacgcgagtgaccatccatggcgtgaacctgggtctggacttctccgagatcgcccaccatgtgcaggtggctggggtgccctgcacgcccctcccaggggaatacatcatcgctgagcagattgtctgtgagatgggccatgccctcgtgggaaccacctccgggccagtacgcctgtgtattggcgagtgtaagccagagttcatgacgaagtcccatcagcagtacaccttcgtgaacccttctgtgctgtcactcaacccaatccgaggtcccgagtcaggaggcactatggtgaccattaccggccattaccttggggctgggagcagcgtggcagtctacctgggcaaccagacctgcgagttctacgggaggtcaatgagtgagatcgtgtgtgtctcacccccatcatccaatggccttggcccggtccctgtttctgtgagtgtcgaccgagcccatgtggatagcaacctgcagtttgagtacatagatgaccctcgggtccagcgcatcgagccagagtggagcattgccagtggccacacacccctgaccatcacaggcttcaacctggatgtcattcaggagccaaggatccgagtcaaattcaatggcaaagaatctgtcaatgtgtgtaaagttgtgaacacaaccaccctcacctgcctggcaccctctctgaccacggactaccgccctggcctggacactgtggaacgcccagatgagtttggatttgtctttaacaatgtccaatccttgctaatttacaacgacaccaagtttatctactaccccaacccgacctttgaactgcttagccctactggagtcttggatcaaaagccaggatcgcccatcattctgaagggcaaaaacctctgccctcctgcctctggaggggccaaactcaactacactgtgctcatcggagagaccccttgtgctgtcaccgtatctgagacccagcttctctgcgagcctcccaacctcaccgggcagcacaaggtcatggttcacgtgggcgggatggtgttctcgcctggctcggtgagtgtcatctcagacagcttgctgaccctgccagccatcgtcagcatcgcggccggcggcagcctcctcctcatcatcgtcatcatcgtcctcattgcctacaagcgcaagtctcgagaaaatgacctcactctcaagcggctgcaaatgcagatggacaatctggagtcccgtgtggccttggagtgcaaggaagcttttgctgagctccagacggatatcaatgagttgaccagtgacctggaccgctcaggaatcccttacctggactatcgtacctacgctatgcgagtcctgttcccgggcatcgaggaccaccccgtcctgcgggagctggaggtacaaggaaacgggcagcagcacgtggagaaggccctgaagctctttgcccagctcatcaacaacaaggtgttcctgctgaccttcatccgcaccctggagctgcagcgcagtttctccatgcgcgaccggggcaacgtggcttcgctcatcatgaccggcctgcagggccgcctggaatatgccactgatgtcctcaagcagctgctctctgacctcatcgataagaacctggagaacaagaaccaccccaagctgctactccggaggacagagtctgtggctgaaaagatgctgaccaattggttcgccttcctcctgcacaagttcctaaaggagtgcgcaggggagccactcttcatgctatactgtgccatcaagcagcagatggagaagggccccattgatgccatcacgggcgaggcccgctactccctgagcgaggacaagctcatccggcagcagatcgagtacaagaccctgatcctgaactgcgtcaaccctgacaacgagaacagtccagagatcccagtgaaggtgttaaactgtgacaccatcacacaggtcaaggagaagattcttgatgccgtgtataagaatgtgccctattcccagcggccgagggcagtggacatggacttggagtggcgccaaggccggatcgcccgggtcgtgctgcaagatgaggacatcaccaccaagattgagggtgactggaagcggctcaacacactgatgcattatcaggtgtcagacaggtcggtggtggctctggtccccaaacagacctcctcctacaacatccctgcctctgccagcatctcccggacgtccatcagcagatatgactcctccttcaggtatacgggcagccccgacagcctgcggtcccgggccccgatgatcaccccagacctggaaagtggggtcaaggtgtggcatctggtgaagaaccatgaccacggtgaccagaaggagggtgaccggggcagcaagatggtgtccgagatctacctgacccggctactggccaccaagactctcctggtcctgctgtgctcctgccaggaggcacccagtcctccagcttgttcctcggacactgtttccggactggcttgcagcctgtgccccctcattcacccatgggaagcccggacccggggcacttcctgtcttcctgtcaaagaccctgagcctacaccctgtgtggaatgtggaatgtggctgcagggcaccctgcagaagtttgtggacgacttgtttgagaccttgttcagcactgtgcaccggggcagcgctctccccctggccatcaagtacatgtttgatttcctagatgagcaggcagacaggcacagcatccatgacacagatgtgcggcacacctggaaaagcaactgcctccctctgcgcttctgggtgaacgtgattaagaacccccagttcgtgtttgacatccacaagggcagcatcacggacgcctgcctctctgtggtggcccagaccttcatggactcttgttcaacgtcagagcaccggctgggcaaggactccccctccaacaagctgctctatgccaaggacatccccagctacaagagctgggtggagagatactacgcagacatcgccaagctcccagccatcagtgaccaggacatgaatgcctacctcgccgagcagtcccgcctgcacgccgtggagttcaacatgctgagtgccctcaatgagatctactcctatgtcagcaagtatagtgaggagctcatcggggccctagagcaggatgagcaggcacggcggcagcggctggcttataaggtggagcagctcattaatgccatgtccattgagagctga

SEQ ID NO: 142 - protein, 1959 aa, Homo sapiens
MEQRRPWPRALEVDSRSVVLLSVVWVLLAPPAAGMPQFSTFHSENRDWTFNHLTVHQGTGAVYVGAINRVYKLTGNLTIQVAHKTGPEEDNKSCYPPLIVQPCSEVLTLTNNVNKLLIIDYSENRLLACGSLYQGVCKLLRLDDLFILVEPSHKKEHYLSSVNKTGTMYGVIVRSEGEDGKLFIGTAVDGKQDYFPTLSSRKLPRDPESSAMLDYELHSDFVSSLIKIPSDTLALVSHFDIFYIYGFASGGFVYFLTVQPETPEGVAINSAGDLFYTSRIVRLCKDDPKFHSYVSLPFGCTRAGVEYRLLQAAYLAKPGDSLAQAFNITSQDDVLFAIFSKGQKQYHHPPDDSALCAFPIRAINLQIKERLQSCYQGEGNLELNWLLGKDVQCTKAPVPIDDNFCGLDINQPLGGSTPVEGLTLYTTSRDRMTSVASYVYNGYSVVFVGTKSGKLKKIRADGPPHGGVQYEMVSVLKDGSPILRDMAFSIDQRYLYVMSERQVTRVPVESCEQYTTCGECLSSGDPHCGWCALHNMCSRRDKCQQAWEPNRFAASISQCVSLAVHPSSISVSEHSRLLSLVVSDAPDLSAGIACAFGNLTEVEGQVSGSQVICISPGPKDVPVIPLDQDWFGLELQLRSKETGKIFVSTEFKFYNCSAHQLCLSCVNSAFRCHWCKYRNLCTHDPTTCSFQEGRINISEDCPQLVPTEEILIPVGEVKPITLKARNLPQPQSGQRGYECVLNIQGAIHRVPALRFNSSSVQCQNSSYQYDGMDISNLAVDFAVVWNGNFIIDNPQDLKVHLYKCAAQRESCGLCLKADRKFECGWCSGERRCTLHQHCTSPSSPWLDWSSHNVKCSNPQITEILTVSGPPEGGTRVTIHGVNLGLDFSEIAHHVQVAGVPCTPLPGEYIIAEQIVCEMGHALVGTTSGPVRLCIGECKPEFMTKSHQQYTFVNPSVLSLNPIRGPESGGTMVTITGHYLGAGSSVAVYLGNQTCEFYGRSMSEIVCVSPPSSNGLGPVPVSVSVDRAHVDSNLQFEYIDDPRVQRIEPEWSIASGHTPLTITGFNLDVIQEPRIRVKFNGKESVNVCKVVNTTTLTCLAPSLTTDYRPGLDTVERPDEFGFVFNNVQSLLIYNDTKFIYYPNPTFELLSPTGVLDQKPGSPIILKGKNLCPPASGGAKLNYTVLIGETPCAVTVSETQLLCEPPNLTGQHKVMVHVGGMVFSPGSVSVISDSLLTLPAIVSIAAGGSLLLIIVIIVLIAYKRKSRENDLTLKRLQMQMDNLESRVALECKEAFAELQTDINELTSDLDRSGIPYLDYRTYAMRVLFPGIEDHPVLRELEVQGNGQQHVEKALKLFAQLINNKVFLLTFIRTLELQRSFSMRDRGNVASLIMTGLQGRLEYATDVLKQLLSDLIDKNLENKNHPKLLLRRTESVAEKMLTNWFAFLLHKFLKECAGEPLFMLYCAIKQQMEKGPIDAITGEARYSLSEDKLIRQQIEYKTLILNCVNPDNENSPEIPVKVLNCDTITQVKEKILDAVYKNVPYSQRPRAVDMDLEWRQGRIARVVLQDEDITTKIEGDWKRLNTLMHYQVSDRSVVALVPKQTSSYNIPASASISRTSISRYDSSFRYTGSPDSLRSRAPMITPDLESGVKVWHLVKNHDHGDQKEGDRGSKMVSEIYLTRLLATKTLLVLLCSCQEAPSPPACSSDTVSGLACSLCPLIHPWEARTRGTSCLPVKDPEPTPCVECGMWLQGTLQKFVDDLFETLFSTVHRGSALPLAIKYMFDFLDEQADRHSIHDTDVRHTWKSNCLPLRFWVNVIKNPQFVFDIHKGSITDACLSVVAQTFMDSCSTSEHRLGKDSPSNKLLYAKDIPSYKSWVERYYADIAKLPAISDQDMNAYLAEQSRLHAVEFNMLSALNEIYSYVSKYSEELIGALEQDEQARRQRLAYKVEQLINAMSIES

SEQ ID NO: 143 - DNA, 5685 bp, Homo sapiens
  CDS (1)...(5685)
atggaacagaggcggccctggccccgggccctggaggtggacagccgctctgtggtcctgctctcagtggtctgggtgctgctggcccccccagcagccggcatgcctcagttcagcaccttccactctgagaatcgtgactggaccttcaaccacttgaccgtccaccaagggacgggggccgtctatgtgggggccatcaaccgggtctataagctgacaggcaacctgaccatccaggtggctcataagacagggccagaagaggacaacaagtcttgttacccgcccctcatcgtgcagccctgcagcgaagtgctcaccctcaccaacaatgtcaacaagctgctcatcattgactactctgagaaccgcctgctggcctgtgggagcctctaccagggggtctgcaagctgctgcggctggatgacctcttcatcctggtggagccatcccacaagaaggagcactacctgtccagtgtcaacaagacgggcaccatgtacggggtgattgtgcgctctgagggtgaggatggcaagctcttcatcggcacggctgtggatgggaagcaggattacttcccgaccctgtccagccggaagctgccccgagaccctgagtcctcagccatgctcgactatgagctacacagcgattttgtctcctctctcatcaagatcccttcagacaccctggccctggtctcccactttgacatcttctacatctacggctttgctagtgggggctttgtctactttctcactgtccagcccgagacccctgagggtgtggccatcaactccgctggagacctcttctacacctcacgcatcgtgcggctctgcaaggatgaccccaagttccactcatacgtgtccctgcccttcggctgcacccgggccggggtggaataccgcctcctgcaggctgcttacctggccaagcctggggactcactggcccaggccttcaatatcaccagccaggacgatgtactctttgccatcttctccaaagggcagaagcagtatcaccacccgcccgatgactctgccctgtgtgccttccctatccgggccatcaacttgcagatcaaggagcgcctgcagtcctgctaccagggcgagggcaacctggagctcaactggctgctggggaaggacgtccagtgcaccaaggcgcctgtccccatcgatgataacttctgtggactggacatcaaccagcccctgggaggctcaactccagtggagggcctgaccctgtacaccaccagcagggaccgcatgacctctgtggcctcctacgtttacaacggctacagcgtggtttttgtggggactaagagtggcaagctgaaaaagattcgggccgacggtcccccccatggtggggtccagtacgagatggtctctgtgctcaaggacggaagccccatcctccgggacatggccttctccattgatcagcgctacctgtacgtcatgtctgagagacaggtcaccagggtccccgtggagtcatgtgagcagtatacgacttgtggggagtgcctgagctctggggaccctcactgtggctggtgtgccctgcacaacatgtgctcccgcagggacaaatgccaacaggcctgggaacctaatcgatttgctgccagcatcagccagtgtgtgagccttgcagtgcatcccagcagcatctcagtatctgagcacagccggttgcttagcctggtagtgagtgatgctcctgatctatctgcgggtatcgcctgtgcctttgggaacctgacagaggtggaggggcaggtgtccgggagccaggtcatctgcatctcacctgggcccaaggatgtccctgtcatcccgctggatcaagactggtttgggctggagctacagctgaggtccaaggagacagggaagatatttgtcagcaccgagttcaagttttacaactgcagtgcccaccaactgtgcctgtcctgtgtcaacagcgccttccgctgccattggtgcaagtaccgcaacctctgcactcatgaccccaccacctgctccttccaggagggccggatcaatatttcagaggactgtccccagctggtgcccacagaggagatcttgattccagtcggggaggtaaagccaatcacccttaaggcgcgaaatctgccccagccgcagtccggccagcgaggctatgagtgtgtcctcaacatacaaggagccatccaccgggtccccgctctgcgcttcaacagctccagcgttcagtgtcagaacagctcgtaccagtatgatggcatggacatcagcaatctggccgtggatttcgctgtggtgtggaacggcaatttcatcattgacaaccctcaggacctgaaagtccatctctacaagtgtgcagcccagcgggagagctgcggcctctgcctcaaggccgaccggaagtttgagtgtggctggtgcagcggcgagcgcaggtgcaccctccaccagcactgtaccagcccttccagcccctggctcgactggtccagccacaatgtcaagtgctccaaccctcaaatcaccgagattttgacggtgtctggaccgccggaaggagggacgcgagtgaccatccatggcgtgaacctgggtctggacttctccgagatcgcccaccatgtgcaggtggctggggtgccctgcacgcccctcccaggggaatacatcatcgctgagcagattgtctgtgagatgggccatgccctcgtgggaaccacctccgggccagtacgcctgtgtattggcgagtgtaagccagagttcatgacgaagtcccatcagcagtacaccttcgtgaacccttctgtgctgtcactcaacccaatccgaggtcccgagtcaggaggcactatggtgaccattaccggccattaccttggggctgggagcagcgtggcagtctacctgggcaaccagacctgcgagttctacgggaggtcaatgagtgagatcgtgtgtgtctcacccccatcatccaatggccttggcccggtccctgtttctgtgagtgtcgaccgagcccatgtggatagcaacctgcagtttgagtacatagatgaccctcgggtccagcgcatcgagccagagtggagcattgccagtggccacacacccctgaccatcacaggcttcaacctggatgtcattcaggagccaaggatccgagtcaaattcaatggcaaagaatctgtcaatgtgtgtaaagttgtgaacacaaccaccctcacctgcctggcaccctctctgaccacggactaccgccctggcctggacactgtggaacgcccagatgagtttggatttgtctttaacaatgtccaatccttgctaatttacaacgacaccaagtttatctactaccccaacccgacctttgaactgcttagccctactggagtcttggatcaaaagccaggatcgcccatcattctgaagggcaaaaacctctgccctcctgcctctggaggggccaaactcaactacactgtgctcatcggagagaccccttgtgctgtcaccgtatctgagacccagcttctctgcgagcctcccaacctcaccgggcagcacaaggtcatggttcacgtgggcgggatggtgttctcgcctggctcggtgagtgtcatctcagacagcttgctgaccctgccagccatcgtcagcatcgcggccggcggcagcctcctcctcatcatcgtcatcatcgtcctcattgcctacaagcgcaagtctcgagaaaatgacctcactctcaagcggctgcaaatgcagatggacaatctggagtcccgtgtggccttggagtgcaaggaagcttttgctgagctccagacggatatcaatgagttgaccagtgacctggaccgctcaggaatcccttacctggactatcgtacctacgctatgcgagtcctgttcccgggcatcgaggaccaccccgtcctgcgggagctggaggtacaaggaaacgggcagcagcacgtggagaaggccctgaagctctttgcccagctcatcaacaacaaggtgttcctgctgaccttcatccgcaccctggagctgcagcgcagtttctccatgcgcgaccggggcaacgtggcttcgctcatcatgaccggcctgcagggccgcctggaatatgccactgatgtcctcaagcagctgctctctgacctcatcgataagaacctggagaacaagaaccaccccaagctgctactccggaggacagagtctgtggctgaaaagatgctgaccaattggttcgccttcctcctgcacaagttcctaaaggagtgcgcaggggagccactcttcatgctatactgtgccatcaagcagcagatggagaagggccccattgatgccatcacgggcgaggcccgctactccctgagcgaggacaagctcatccggcagcagatcgagtacaagaccctgatcctgaactgcgtcaaccctgacaacgagaacagtccagagatcccagtgaaggtgttaaactgtgacaccatcacacaggtcaaggagaagattcttgatgccgtgtataagaatgtgccctattcccagcggccgagggcagtggacatggacttggagtggcgccaaggccggatcgcccgggtcgtgctgcaagatgaggacatcaccaccaagattgagggtgactggaagcggctcaacacactgatgcattatcaggtgtcagacaggtcggtggtggctctggtccccaaacagacctcctcctacaacatccctgcctctgccagcatctcccggacgtccatcagcagatatgactcctccttcaggtatacgggcagccccgacagcctgcggtcccgggccccgatgatcaccccagacctggaaagtggggtcaaggtgtggcatctggtgaagaaccatgaccacggtgaccagaaggagggtgaccggggcagcaagatggtgtccgagatctacctgacccggctactggccaccaagggcaccctgcagaagtttgtggacgacttgtttgagaccttgttcagcactgtgcaccggggcagcgctctccccctggccatcaagtacatgtttgatttcctagatgagcaggcagacaggcacagcatccatgacacagatgtgcggcacacctggaaaagcaactgcctccctctgcgcttctgggtgaacgtgattaagaacccccagttcgtgtttgacatccacaagggcagcatcacggacgcctgcctctctgtggtggcccagaccttcatggactcttgttcaacgtcagagcaccggctgggcaaggactccccctccaacaagctgctctatgccaaggacatccccagctacaagagctgggtggagagatactacgcagacatcgccaagctcccagccatcagtgaccaggacatgaatgcctacctcgccgagcagtcccgcctgcacgccgtggagttcaacatgctgagtgccctcaatgagatctactcctatgtcagcaagtatagtgaggagctcatcggggccctagagcaggatgagcaggcacggcggcagcggctggcttataaggtggagcagctcattaatgccatgtccattgagagctga

SEQ ID NO: 144 - protein, 1894 aa, Homo sapiens
MEQRRPWPRALEVDSRSVVLLSVVWVLLAPPAAGMPQFSTFHSENRDWTFNHLTVHQGTGAVYVGAINRVYKLTGNLTIQVAHKTGPEEDNKSCYPPLIVQPCSEVLTLTNNVNKLLIIDYSENRLLACGSLYQGVCKLLRLDDLFILVEPSHKKEHYLSSVNKTGTMYGVIVRSEGEDGKLFIGTAVDGKQDYFPTLSSRKLPRDPESSAMLDYELHSDFVSSLIKIPSDTLALVSHFDIFYIYGFASGGFVYFLTVQPETPEGVAINSAGDLFYTSRIVRLCKDDPKFHSYVSLPFGCTRAGVEYRLLQAAYLAKPGDSLAQAFNITSQDDVLFAIFSKGQKQYHHPPDDSALCAFPIRAINLQIKERLQSCYQGEGNLELNWLLGKDVQCTKAPVPIDDNFCGLDINQPLGGSTPVEGLTLYTTSRDRMTSVASYVYNGYSVVFVGTKSGKLKKIRADGPPHGGVQYEMVSVLKDGSPILRDMAFSIDQRYLYVMSERQVTRVPVESCEQYTTCGECLSSGDPHCGWCALHNMCSRRDKCQQAWEPNRFAASISQCVSLAVHPSSISVSEHSRLLSLVVSDAPDLSAGIACAFGNLTEVEGQVSGSQVICISPGPKDVPVIPLDQDWFGLELQLRSKETGKIFVSTEFKFYNCSAHQLCLSCVNSAFRCHWCKYRNLCTHDPTTCSFQEGRINISEDCPQLVPTEEILIPVGEVKPITLKARNLPQPQSGQRGYECVLNIQGAIHRVPALRFNSSSVQCQNSSYQYDGMDISNLAVDFAVVWNGNFIIDNPQDLKVHLYKCAAQRESCGLCLKADRKFECGWCSGERRCTLHQHCTSPSSPWLDWSSHNVKCSNPQITEILTVSGPPEGGTRVTIHGVNLGLDFSEIAHHVQVAGVPCTPLPGEYIIAEQIVCEMGHALVGTTSGPVRLCIGECKPEFMTKSHQQYTFVNPSVLSLNPIRGPESGGTMVTITGHYLGAGSSVAVYLGNQTCEFYGRSMSEIVCVSPPSSNGLGPVPVSVSVDRAHVDSNLQFEYIDDPRVQRIEPEWSIASGHTPLTITGFNLDVIQEPRIRVKFNGKESVNVCKVVNTTTLTCLAPSLTTDYRPGLDTVERPDEFGFVFNNVQSLLIYNDTKFIYYPNPTFELLSPTGVLDQKPGSPIILKGKNLCPPASGGAKLNYTVLIGETPCAVTVSETQLLCEPPNLTGQHKVMVHVGGMVFSPGSVSVISDSLLTLPAIVSIAAGGSLLLIIVIIVLIAYKRKSRENDLTLKRLQMQMDNLESRVALECKEAFAELQTDINELTSDLDRSGIPYLDYRTYAMRVLFPGIEDHPVLRELEVQGNGQQHVEKALKLFAQLINNKVFLLTFIRTLELQRSFSMRDRGNVASLIMTGLQGRLEYATDVLKQLLSDLIDKNLENKNHPKLLLRRTESVAEKMLTNWFAFLLHKFLKECAGEPLFMLYCAIKQQMEKGPIDAITGEARYSLSEDKLIRQQIEYKTLILNCVNPDNENSPEIPVKVLNCDTITQVKEKILDAVYKNVPYSQRPRAVDMDLEWRQGRIARVVLQDEDITTKIEGDWKRLNTLMHYQVSDRSVVALVPKQTSSYNIPASASISRTSISRYDSSFRYTGSPDSLRSRAPMITPDLESGVKVWHLVKNHDHGDQKEGDRGSKMVSEIYLTRLLATKGTLQKFVDDLFETLFSTVHRGSALPLAIKYMFDFLDEQADRHSIHDTDVRHTWKSNCLPLRFWVNVIKNPQFVFDIHKGSITDACLSVVAQTFMDSCSTSEHRLGKDSPSNKLLYAKDIPSYKSWVERYYADIAKLPAISDQDMNAYLAEQSRLHAVEFNMLSALNEIYSYVSKYSEELIGALEQDEQARRQRLAYKVEQLINAMSIES

SEQ ID NO: 145 - DNA, 5925 bp, Homo sapiens
  CDS (1)...(5925)
atgagcacacacaggagccgtctcctcaccgccgcccctctcagcatggaacagaggcggccctggccccgggccctggaggtggacagccgctctgtggtcctgctctcagtggtctgggtgctgctggcccccccagcagccggcatgcctcagttcagcaccttccactctgagaatcgtgactggaccttcaaccacttgaccgtccaccaagggacgggggccgtctatgtgggggccatcaaccgggtctataagctgacaggcaacctgaccatccaggtggctcataagacagggccagaagaggacaacaagtcttgttacccgcccctcatcgtgcagccctgcagcgaagtgctcaccctcaccaacaatgtcaacaagctgctcatcattgactactctgagaaccgcctgctggcctgtgggagcctctaccagggggtctgcaagctgctgcggctggatgacctcttcatcctggtggagccatcccacaagaaggagcactacctgtccagtgtcaacaagacgggcaccatgtacggggtgattgtgcgctctgagggtgaggatggcaagctcttcatcggcacggctgtggatgggaagcaggattacttcccgaccctgtccagccggaagctgccccgagaccctgagtcctcagccatgctcgactatgagctacacagcgattttgtctcctctctcatcaagatcccttcagacaccctggccctggtctcccactttgacatcttctacatctacggctttgctagtgggggctttgtctactttctcactgtccagcccgagacccctgagggtgtggccatcaactccgctggagacctcttctacacctcacgcatcgtgcggctctgcaaggatgaccccaagttccactcatacgtgtccctgcccttcggctgcacccgggccggggtggaataccgcctcctgcaggctgcttacctggccaagcctggggactcactggcccaggccttcaatatcaccagccaggacgatgtactctttgccatcttctccaaagggcagaagcagtatcaccacccgcccgatgactctgccctgtgtgccttccctatccgggccatcaacttgcagatcaaggagcgcctgcagtcctgctaccagggcgagggcaacctggagctcaactggctgctggggaaggacgtccagtgcaccaaggcgcctgtccccatcgatgataacttctgtggactggacatcaaccagcccctgggaggctcaactccagtggagggcctgaccctgtacaccaccagcagggaccgcatgacctctgtggcctcctacgtttacaacggctacagcgtggtttttgtggggactaagagtggcaagctgaaaaagattcgggccgacggtcccccccatggtggggtccagtacgagatggtctctgtgctcaaggacggaagccccatcctccgggacatggccttctccattgatcagcgctacctgtacgtcatgtctgagagacaggtcaccagggtccccgtggagtcatgtgagcagtatacgacttgtggggagtgcctgagctctggggaccctcactgtggctggtgtgccctgcacaacatgtgctcccgcagggacaaatgccaacaggcctgggaacctaatcgatttgctgccagcatcagccagtgtgtgagccttgcagtgcatcccagcagcatctcagtatctgagcacagccggttgcttagcctggtagtgagtgatgctcctgatctatctgcgggtatcgcctgtgcctttgggaacctgacagaggtggaggggcaggtgtccgggagccaggtcatctgcatctcacctgggcccaaggatgtccctgtcatcccgctggatcaagactggtttgggctggagctacagctgaggtccaaggagacagggaagatatttgtcagcaccgagttcaagttttacaactgcagtgcccaccaactgtgcctgtcctgtgtcaacagcgccttccgctgccattggtgcaagtaccgcaacctctgcactcatgaccccaccacctgctccttccaggagggccggatcaatatttcagaggactgtccccagctggtgcccacagaggagatcttgattccagtcggggaggtaaagccaatcacccttaaggcgcgaaatctgccccagccgcagtccggccagcgaggctatgagtgtgtcctcaacatacaaggagccatccaccgggtccccgctctgcgcttcaacagctccagcgttcagtgtcagaacagctcgtaccagtatgatggcatggacatcagcaatctggccgtggatttcgctgtggtgtggaacggcaatttcatcattgacaaccctcaggacctgaaagtccatctctacaagtgtgcagcccagcgggagagctgcggcctctgcctcaaggccgaccggaagtttgagtgtggctggtgcagcggcgagcgcaggtgcaccctccaccagcactgtaccagcccttccagcccctggctcgactggtccagccacaatgtcaagtgctccaaccctcaaatcaccgagattttgacggtgtctggaccgccggaaggagggacgcgagtgaccatccatggcgtgaacctgggtctggacttctccgagatcgcccaccatgtgcaggtggctggggtgccctgcacgcccctcccaggggaatacatcatcgctgagcagattgtctgtgagatgggccatgccctcgtgggaaccacctccgggccagtacgcctgtgtattggcgagtgtaagccagagttcatgacgaagtcccatcagcagtacaccttcgtgaacccttctgtgctgtcactcaacccaatccgaggtcccgagtcaggaggcactatggtgaccattaccggccattaccttggggctgggagcagcgtggcagtctacctgggcaaccagacctgcgagttctacgggaggtcaatgagtgagatcgtgtgtgtctcacccccatcatccaatggccttggcccggtccctgtttctgtgagtgtcgaccgagcccatgtggatagcaacctgcagtttgagtacatagatgaccctcgggtccagcgcatcgagccagagtggagcattgccagtggccacacacccctgaccatcacaggcttcaacctggatgtcattcaggagccaaggatccgagtcaaattcaatggcaaagaatctgtcaatgtgtgtaaagttgtgaacacaaccaccctcacctgcctggcaccctctctgaccacggactaccgccctggcctggacactgtggaacgcccagatgagtttggatttgtctttaacaatgtccaatccttgctaatttacaacgacaccaagtttatctactaccccaacccgacctttgaactgcttagccctactggagtcttggatcaaaagccaggatcgcccatcattctgaagggcaaaaacctctgccctcctgcctctggaggggccaaactcaactacactgtgctcatcggagagaccccttgtgctgtcaccgtatctgagacccagcttctctgcgagcctcccaacctcaccgggcagcacaaggtcatggttcacgtgggcgggatggtgttctcgcctggctcggtgagtgtcatctcagacagcttgctgaccctgccagccatcgtcagcatcgcggccggcggcagcctcctcctcatcatcgtcatcatcgtcctcattgcctacaagcgcaagtctcgagaaaatgacctcactctcaagcggctgcaaatgcagatggacaatctggagtcccgtgtggccttggagtgcaaggaagcttttgctgagctccagacggatatcaatgagttgaccagtgacctggaccgctcaggaatcccttacctggactatcgtacctacgctatgcgagtcctgttcccgggcatcgaggaccaccccgtcctgcgggagctggaggtacaaggaaacgggcagcagcacgtggagaaggccctgaagctctttgcccagctcatcaacaacaaggtgttcctgctgaccttcatccgcaccctggagctgcagcgcagtttctccatgcgcgaccggggcaacgtggcttcgctcatcatgaccggcctgcagggccgcctggaatatgccactgatgtcctcaagcagctgctctctgacctcatcgataagaacctggagaacaagaaccaccccaagctgctactccggaggacagagtctgtggctgaaaagatgctgaccaattggttcgccttcctcctgcacaagttcctaaaggagtgcgcaggggagccactcttcatgctatactgtgccatcaagcagcagatggagaagggccccattgatgccatcacgggcgaggcccgctactccctgagcgaggacaagctcatccggcagcagatcgagtacaagaccctgatcctgaactgcgtcaaccctgacaacgagaacagtccagagatcccagtgaaggtgttaaactgtgacaccatcacacaggtcaaggagaagattcttgatgccgtgtataagaatgtgccctattcccagcggccgagggcagtggacatggacttggagtggcgccaaggccggatcgcccgggtcgtgctgcaagatgaggacatcaccaccaagattgagggtgactggaagcggctcaacacactgatgcattatcaggtgtcagacaggtcggtggtggctctggtccccaaacagacctcctcctacaacatccctgcctctgccagcatctcccggacgtccatcagcagatatgactcctccttcaggtatacgggcagccccgacagcctgcggtcccgggccccgatgatcaccccagacctggaaagtggggtcaaggtgtggcatctggtgaagaaccatgaccacggtgaccagaaggagggtgaccggggcagcaagatggtgtccgagatctacctgacccggctactggccaccaagactctcctggtcctgctgtgctcctgccaggaggcacccagtcctccagcttgttcctcggacactgtttccggactggcttgcagcctgtgccccctcattcacccatgggaagcccggacccggggcacttcctgtcttcctgtcaaagaccctgagcctacaccctgtgtggaatgtggaatgtggctgcagggcaccctgcagaagtttgtggacgacttgtttgagaccttgttcagcactgtgcaccggggcagcgctctccccctggccatcaagtacatgtttgatttcctagatgagcaggcagacaggcacagcatccatgacacagatgtgcggcacacctggaaaagcaactgcctccctctgcgcttctgggtgaacgtgattaagaacccccagttcgtgtttgacatccacaagggcagcatcacggacgcctgcctctctgtggtggcccagaccttcatggactcttgttcaacgtcagagcaccggctgggcaaggactccccctccaacaagctgctctatgccaaggacatccccagctacaagagctgggtggagagatactacgcagacatcgccaagctcccagccatcagtgaccaggacatgaatgcctacctcgccgagcagtcccgcctgcacgccgtggagttcaacatgctgagtgccctcaatgagatctactcctatgtcagcaagtatagtgaggagctcatcggggccctagagcaggatgagcaggcacggcggcagcggctggcttataaggtggagcagctcattaatgccatgtccattgagagctga

SEQ ID NO: 146 - protein, 1974 aa, Homo sapiens
MSTHRSRLLTAAPLSMEQRRPWPRALEVDSRSVVLLSVVWVLLAPPAAGMPQFSTFHSENRDWTFNHLTVHQGTGAVYVGAINRVYKLTGNLTIQVAHKTGPEEDNKSCYPPLIVQPCSEVLTLTNNVNKLLIIDYSENRLLACGSLYQGVCKLLRLDDLFILVEPSHKKEHYLSSVNKTGTMYGVIVRSEGEDGKLFIGTAVDGKQDYFPTLSSRKLPRDPESSAMLDYELHSDFVSSLIKIPSDTLALVSHFDIFYIYGFASGGFVYFLTVQPETPEGVAINSAGDLFYTSRIVRLCKDDPKFHSYVSLPFGCTRAGVEYRLLQAAYLAKPGDSLAQAFNITSQDDVLFAIFSKGQKQYHHPPDDSALCAFPIRAINLQIKERLQSCYQGEGNLELNWLLGKDVQCTKAPVPIDDNFCGLDINQPLGGSTPVEGLTLYTTSRDRMTSVASYVYNGYSVVFVGTKSGKLKKIRADGPPHGGVQYEMVSVLKDGSPILRDMAFSIDQRYLYVMSERQVTRVPVESCEQYTTCGECLSSGDPHCGWCALHNMCSRRDKCQQAWEPNRFAASISQCVSLAVHPSSISVSEHSRLLSLVVSDAPDLSAGIACAFGNLTEVEGQVSGSQVICISPGPKDVPVIPLDQDWFGLELQLRSKETGKIFVSTEFKFYNCSAHQLCLSCVNSAFRCHWCKYRNLCTHDPTTCSFQEGRINISEDCPQLVPTEEILIPVGEVKPITLKARNLPQPQSGQRGYECVLNIQGAIHRVPALRFNSSSVQCQNSSYQYDGMDISNLAVDFAVVWNGNFIIDNPQDLKVHLYKCAAQRESCGLCLKADRKFECGWCSGERRCTLHQHCTSPSSPWLDWSSHNVKCSNPQITEILTVSGPPEGGTRVTIHGVNLGLDFSEIAHHVQVAGVPCTPLPGEYIIAEQIVCEMGHALVGTTSGPVRLCIGECKPEFMTKSHQQYTFVNPSVLSLNPIRGPESGGTMVTITGHYLGAGSSVAVYLGNQTCEFYGRSMSEIVCVSPPSSNGLGPVPVSVSVDRAHVDSNLQFEYIDDPRVQRIEPEWSIASGHTPLTITGFNLDVIQEPRIRVKFNGKESVNVCKVVNTTTLTCLAPSLTTDYRPGLDTVERPDEFGFVFNNVQSLLIYNDTKFIYYPNPTFELLSPTGVLDQKPGSPIILKGKNLCPPASGGAKLNYTVLIGETPCAVTVSETQLLCEPPNLTGQHKVMVHVGGMVFSPGSVSVISDSLLTLPAIVSIAAGGSLLLIIVIIVLIAYKRKSRENDLTLKRLQMQMDNLESRVALECKEAFAELQTDINELTSDLDRSGIPYLDYRTYAMRVLFPGIEDHPVLRELEVQGNGQQHVEKALKLFAQLINNKVFLLTFIRTLELQRSFSMRDRGNVASLIMTGLQGRLEYATDVLKQLLSDLIDKNLENKNHPKLLLRRTESVAEKMLTNWFAFLLHKFLKECAGEPLFMLYCAIKQQMEKGPIDAITGEARYSLSEDKLIRQQIEYKTLILNCVNPDNENSPEIPVKVLNCDTITQVKEKILDAVYKNVPYSQRPRAVDMDLEWRQGRIARVVLQDEDITTKIEGDWKRLNTLMHYQVSDRSVVALVPKQTSSYNIPASASISRTSISRYDSSFRYTGSPDSLRSRAPMITPDLESGVKVWHLVKNHDHGDQKEGDRGSKMVSEIYLTRLLATKTLLVLLCSCQEAPSPPACSSDTVSGLACSLCPLIHPWEARTRGTSCLPVKDPEPTPCVECGMWLQGTLQKFVDDLFETLFSTVHRGSALPLAIKYMFDFLDEQADRHSIHDTDVRHTWKSNCLPLRFWVNVIKNPQFVFDIHKGSITDACLSVVAQTFMDSCSTSEHRLGKDSPSNKLLYAKDIPSYKSWVERYYADIAKLPAISDQDMNAYLAEQSRLHAVEFNMLSALNEIYSYVSKYSEELIGALEQDEQARRQRLAYKVEQLINAMSIES

SEQ ID NO: 147 - DNA, 5730 bp, Homo sapiens
  CDS (1)...(5730)
atgagcacacacaggagccgtctcctcaccgccgcccctctcagcatggaacagaggcggccctggccccgggccctggaggtggacagccgctctgtggtcctgctctcagtggtctgggtgctgctggcccccccagcagccggcatgcctcagttcagcaccttccactctgagaatcgtgactggaccttcaaccacttgaccgtccaccaagggacgggggccgtctatgtgggggccatcaaccgggtctataagctgacaggcaacctgaccatccaggtggctcataagacagggccagaagaggacaacaagtcttgttacccgcccctcatcgtgcagccctgcagcgaagtgctcaccctcaccaacaatgtcaacaagctgctcatcattgactactctgagaaccgcctgctggcctgtgggagcctctaccagggggtctgcaagctgctgcggctggatgacctcttcatcctggtggagccatcccacaagaaggagcactacctgtccagtgtcaacaagacgggcaccatgtacggggtgattgtgcgctctgagggtgaggatggcaagctcttcatcggcacggctgtggatgggaagcaggattacttcccgaccctgtccagccggaagctgccccgagaccctgagtcctcagccatgctcgactatgagctacacagcgattttgtctcctctctcatcaagatcccttcagacaccctggccctggtctcccactttgacatcttctacatctacggctttgctagtgggggctttgtctactttctcactgtccagcccgagacccctgagggtgtggccatcaactccgctggagacctcttctacacctcacgcatcgtgcggctctgcaaggatgaccccaagttccactcatacgtgtccctgcccttcggctgcacccgggccggggtggaataccgcctcctgcaggctgcttacctggccaagcctggggactcactggcccaggccttcaatatcaccagccaggacgatgtactctttgccatcttctccaaagggcagaagcagtatcaccacccgcccgatgactctgccctgtgtgccttccctatccgggccatcaacttgcagatcaaggagcgcctgcagtcctgctaccagggcgagggcaacctggagctcaactggctgctggggaaggacgtccagtgcaccaaggcgcctgtccccatcgatgataacttctgtggactggacatcaaccagcccctgggaggctcaactccagtggagggcctgaccctgtacaccaccagcagggaccgcatgacctctgtggcctcctacgtttacaacggctacagcgtggtttttgtggggactaagagtggcaagctgaaaaagattcgggccgacggtcccccccatggtggggtccagtacgagatggtctctgtgctcaaggacggaagccccatcctccgggacatggccttctccattgatcagcgctacctgtacgtcatgtctgagagacaggtcaccagggtccccgtggagtcatgtgagcagtatacgacttgtggggagtgcctgagctctggggaccctcactgtggctggtgtgccctgcacaacatgtgctcccgcagggacaaatgccaacaggcctgggaacctaatcgatttgctgccagcatcagccagtgtgtgagccttgcagtgcatcccagcagcatctcagtatctgagcacagccggttgcttagcctggtagtgagtgatgctcctgatctatctgcgggtatcgcctgtgcctttgggaacctgacagaggtggaggggcaggtgtccgggagccaggtcatctgcatctcacctgggcccaaggatgtccctgtcatcccgctggatcaagactggtttgggctggagctacagctgaggtccaaggagacagggaagatatttgtcagcaccgagttcaagttttacaactgcagtgcccaccaactgtgcctgtcctgtgtcaacagcgccttccgctgccattggtgcaagtaccgcaacctctgcactcatgaccccaccacctgctccttccaggagggccggatcaatatttcagaggactgtccccagctggtgcccacagaggagatcttgattccagtcggggaggtaaagccaatcacccttaaggcgcgaaatctgccccagccgcagtccggccagcgaggctatgagtgtgtcctcaacatacaaggagccatccaccgggtccccgctctgcgcttcaacagctccagcgttcagtgtcagaacagctcgtaccagtatgatggcatggacatcagcaatctggccgtggatttcgctgtggtgtggaacggcaatttcatcattgacaaccctcaggacctgaaagtccatctctacaagtgtgcagcccagcgggagagctgcggcctctgcctcaaggccgaccggaagtttgagtgtggctggtgcagcggcgagcgcaggtgcaccctccaccagcactgtaccagcccttccagcccctggctcgactggtccagccacaatgtcaagtgctccaaccctcaaatcaccgagattttgacggtgtctggaccgccggaaggagggacgcgagtgaccatccatggcgtgaacctgggtctggacttctccgagatcgcccaccatgtgcaggtggctggggtgccctgcacgcccctcccaggggaatacatcatcgctgagcagattgtctgtgagatgggccatgccctcgtgggaaccacctccgggccagtacgcctgtgtattggcgagtgtaagccagagttcatgacgaagtcccatcagcagtacaccttcgtgaacccttctgtgctgtcactcaacccaatccgaggtcccgagtcaggaggcactatggtgaccattaccggccattaccttggggctgggagcagcgtggcagtctacctgggcaaccagacctgcgagttctacgggaggtcaatgagtgagatcgtgtgtgtctcacccccatcatccaatggccttggcccggtccctgtttctgtgagtgtcgaccgagcccatgtggatagcaacctgcagtttgagtacatagatgaccctcgggtccagcgcatcgagccagagtggagcattgccagtggccacacacccctgaccatcacaggcttcaacctggatgtcattcaggagccaaggatccgagtcaaattcaatggcaaagaatctgtcaatgtgtgtaaagttgtgaacacaaccaccctcacctgcctggcaccctctctgaccacggactaccgccctggcctggacactgtggaacgcccagatgagtttggatttgtctttaacaatgtccaatccttgctaatttacaacgacaccaagtttatctactaccccaacccgacctttgaactgcttagccctactggagtcttggatcaaaagccaggatcgcccatcattctgaagggcaaaaacctctgccctcctgcctctggaggggccaaactcaactacactgtgctcatcggagagaccccttgtgctgtcaccgtatctgagacccagcttctctgcgagcctcccaacctcaccgggcagcacaaggtcatggttcacgtgggcgggatggtgttctcgcctggctcggtgagtgtcatctcagacagcttgctgaccctgccagccatcgtcagcatcgcggccggcggcagcctcctcctcatcatcgtcatcatcgtcctcattgcctacaagcgcaagtctcgagaaaatgacctcactctcaagcggctgcaaatgcagatggacaatctggagtcccgtgtggccttggagtgcaaggaagcttttgctgagctccagacggatatcaatgagttgaccagtgacctggaccgctcaggaatcccttacctggactatcgtacctacgctatgcgagtcctgttcccgggcatcgaggaccaccccgtcctgcgggagctggaggtacaaggaaacgggcagcagcacgtggagaaggccctgaagctctttgcccagctcatcaacaacaaggtgttcctgctgaccttcatccgcaccctggagctgcagcgcagtttctccatgcgcgaccggggcaacgtggcttcgctcatcatgaccggcctgcagggccgcctggaatatgccactgatgtcctcaagcagctgctctctgacctcatcgataagaacctggagaacaagaaccaccccaagctgctactccggaggacagagtctgtggctgaaaagatgctgaccaattggttcgccttcctcctgcacaagttcctaaaggagtgcgcaggggagccactcttcatgctatactgtgccatcaagcagcagatggagaagggccccattgatgccatcacgggcgaggcccgctactccctgagcgaggacaagctcatccggcagcagatcgagtacaagaccctgatcctgaactgcgtcaaccctgacaacgagaacagtccagagatcccagtgaaggtgttaaactgtgacaccatcacacaggtcaaggagaagattcttgatgccgtgtataagaatgtgccctattcccagcggccgagggcagtggacatggacttggagtggcgccaaggccggatcgcccgggtcgtgctgcaagatgaggacatcaccaccaagattgagggtgactggaagcggctcaacacactgatgcattatcaggtgtcagacaggtcggtggtggctctggtccccaaacagacctcctcctacaacatccctgcctctgccagcatctcccggacgtccatcagcagatatgactcctccttcaggtatacgggcagccccgacagcctgcggtcccgggccccgatgatcaccccagacctggaaagtggggtcaaggtgtggcatctggtgaagaaccatgaccacggtgaccagaaggagggtgaccggggcagcaagatggtgtccgagatctacctgacccggctactggccaccaagggcaccctgcagaagtttgtggacgacttgtttgagaccttgttcagcactgtgcaccggggcagcgctctccccctggccatcaagtacatgtttgatttcctagatgagcaggcagacaggcacagcatccatgacacagatgtgcggcacacctggaaaagcaactgcctccctctgcgcttctgggtgaacgtgattaagaacccccagttcgtgtttgacatccacaagggcagcatcacggacgcctgcctctctgtggtggcccagaccttcatggactcttgttcaacgtcagagcaccggctgggcaaggactccccctccaacaagctgctctatgccaaggacatccccagctacaagagctgggtggagagatactacgcagacatcgccaagctcccagccatcagtgaccaggacatgaatgcctacctcgccgagcagtcccgcctgcacgccgtggagttcaacatgctgagtgccctcaatgagatctactcctatgtcagcaagtatagtgaggagctcatcggggccctagagcaggatgagcaggcacggcggcagcggctggcttataaggtggagcagctcattaatgccatgtccattgagagctga

SEQ ID NO: 148 - protein, 1909 aa, Homo sapiens
MSTHRSRLLTAAPLSMEQRRPWPRALEVDSRSVVLLSVVWVLLAPPAAGMPQFSTFHSENRDWTFNHLTVHQGTGAVYVGAINRVYKLTGNLTIQVAHKTGPEEDNKSCYPPLIVQPCSEVLTLTNNVNKLLIIDYSENRLLACGSLYQGVCKLLRLDDLFILVEPSHKKEHYLSSVNKTGTMYGVIVRSEGEDGKLFIGTAVDGKQDYFPTLSSRKLPRDPESSAMLDYELHSDFVSSLIKIPSDTLALVSHFDIFYIYGFASGGFVYFLTVQPETPEGVAINSAGDLFYTSRIVRLCKDDPKFHSYVSLPFGCTRAGVEYRLLQAAYLAKPGDSLAQAFNITSQDDVLFAIFSKGQKQYHHPPDDSALCAFPIRAINLQIKERLQSCYQGEGNLELNWLLGKDVQCTKAPVPIDDNFCGLDINQPLGGSTPVEGLTLYTTSRDRMTSVASYVYNGYSVVFVGTKSGKLKKIRADGPPHGGVQYEMVSVLKDGSPILRDMAFSIDQRYLYVMSERQVTRVPVESCEQYTTCGECLSSGDPHCGWCALHNMCSRRDKCQQAWEPNRFAASISQCVSLAVHPSSISVSEHSRLLSLVVSDAPDLSAGIACAFGNLTEVEGQVSGSQVICISPGPKDVPVIPLDQDWFGLELQLRSKETGKIFVSTEFKFYNCSAHQLCLSCVNSAFRCHWCKYRNLCTHDPTTCSFQEGRINISEDCPQLVPTEEILIPVGEVKPITLKARNLPQPQSGQRGYECVLNIQGAIHRVPALRFNSSSVQCQNSSYQYDGMDISNLAVDFAVVWNGNFIIDNPQDLKVHLYKCAAQRESCGLCLKADRKFECGWCSGERRCTLHQHCTSPSSPWLDWSSHNVKCSNPQITEILTVSGPPEGGTRVTIHGVNLGLDFSEIAHHVQVAGVPCTPLPGEYIIAEQIVCEMGHALVGTTSGPVRLCIGECKPEFMTKSHQQYTFVNPSVLSLNPIRGPESGGTMVTITGHYLGAGSSVAVYLGNQTCEFYGRSMSEIVCVSPPSSNGLGPVPVSVSVDRAHVDSNLQFEYIDDPRVQRIEPEWSIASGHTPLTITGFNLDVIQEPRIRVKFNGKESVNVCKVVNTTTLTCLAPSLTTDYRPGLDTVERPDEFGFVFNNVQSLLIYNDTKFIYYPNPTFELLSPTGVLDQKPGSPIILKGKNLCPPASGGAKLNYTVLIGETPCAVTVSETQLLCEPPNLTGQHKVMVHVGGMVFSPGSVSVISDSLLTLPAIVSIAAGGSLLLIIVIIVLIAYKRKSRENDLTLKRLQMQMDNLESRVALECKEAFAELQTDINELTSDLDRSGIPYLDYRTYAMRVLFPGIEDHPVLRELEVQGNGQQHVEKALKLFAQLINNKVFLLTFIRTLELQRSFSMRDRGNVASLIMTGLQGRLEYATDVLKQLLSDLIDKNLENKNHPKLLLRRTESVAEKMLTNWFAFLLHKFLKECAGEPLFMLYCAIKQQMEKGPIDAITGEARYSLSEDKLIRQQIEYKTLILNCVNPDNENSPEIPVKVLNCDTITQVKEKILDAVYKNVPYSQRPRAVDMDLEWRQGRIARVVLQDEDITTKIEGDWKRLNTLMHYQVSDRSVVALVPKQTSSYNIPASASISRTSISRYDSSFRYTGSPDSLRSRAPMITPDLESGVKVWHLVKNHDHGDQKEGDRGSKMVSEIYLTRLLATKGTLQKFVDDLFETLFSTVHRGSALPLAIKYMFDFLDEQADRHSIHDTDVRHTWKSNCLPLRFWVNVIKNPQFVFDIHKGSITDACLSVVAQTFMDSCSTSEHRLGKDSPSNKLLYAKDIPSYKSWVERYYADIAKLPAISDQDMNAYLAEQSRLHAVEFNMLSALNEIYSYVSKYSEELIGALEQDEQARRQRLAYKVEQLINAMSIES

SEQ ID NO: 149 - DNA, 2334 bp, Homo sapiens
  CDS (1)...(2334)
atgcttctgtggctgctgctgctgatcctgactcctggaagagaacaatcaggggtggccccaaaagctgtacttctcctcaatcctccatggtccacagccttcaaaggagaaaaagtggctctcatatgcagcagcatatcacattccctagcccagggagacacatattggtatcacgatgagaagttgttgaaaataaaacatgacaagatccaaattacagagcctggaaattaccaatgtaagacccgaggatcctccctcagtgatgccgtgcatgtggaattttcacctgactggctgatcctgcaggctttacatcctgtctttgaaggagacaatgtcattctgagatgtcaggggaaagacaacaaaaacactcatcaaaaggtttactacaaggatggaaaacagcttcctaatagttataatttagagaagatcacagtgaattcagtctccagggataatagcaaatatcattgtactgcttataggaagttttacatacttgacattgaagtaacttcaaaacccctaaatatccaagttcaagagctgtttctacatcctgtgctgagagccagctcttccacgcccatagaggggagtcccatgaccctgacctgtgagacccagctctctccacagaggccagatgtccagctgcaattctccctcttcagagatagccagaccctcggattgggctggagcaggtcccccagactccagatccctgccatgtggactgaagactcagggtcttactggtgtgaggtggagacagtgactcacagcatcaaaaaaaggagcctgagatctcagatacgtgtacagagagtccctgtgtctaatgtgaatctagagatccggcccaccggagggcagctgattgaaggagaaaatatggtccttatttgctcagtagcccagggttcagggactgtcacattctcctggcacaaagaaggaagagtaagaagcctgggtagaaagacccagcgttccctgttggcagagctgcatgttctcaccgtgaaggagagtgatgcagggagatactactgtgcagctgataacgttcacagccccatcctcagcacgtggattcgagtcaccgtgagaattccggtatctcaccctgtcctcaccttcagggctcccagggcccacactgtggtgggggacctgctggagcttcactgtgagtccctgagaggctctcccccgatcctgtaccgattttatcatgaggatgtcaccctggggaacagctcagccccctctggaggaggagcctccttcaacctctctctgactgcagaacattctggaaactactcctgtgatgcagacaatggcctgggggcccagcacagtcatggagtgagtctcagggtcacagttccggtgtctcgccccgtcctcaccctcagggctcccggggcccaggctgtggtgggggacctgctggagcttcactgtgagtccctgagaggctctcccccgatcctgtaccgattttatcatgaggatgtcaccctggggaacagctcagccccctctggaggaggagcctccttcaacctctctctgactgcagaacattctggaaactactcctgtgatgcacacaatggcctgggggcccagcacagtcatggagtgagtctcagggtcacagttcccgtgtctcgccccatcctcaccctcagggctcccagggcccaggctgtggtgggggacctgctggagcttcactgtgaggccctgagaggctctcccccgatcctgtactggttttatcatgaggatgtcaccctggggaacatctcagccccctctggaggaggggcctccttcaacctctctctgactgcagaacattctggaaactactcctgtgaggccaacaacggcctgggggcccagcgcagtgaggcagtgccagtctccatctcaggacctgatggctatagaagagacctcatgacagctggagttctctggggactgtttggtgtccttggtttcactggtgttgctttgctgttgtatgccttgttccacaagatatcaggagaaagttctgccactaatgaacccagaggggcttccaggccaaatcctcaagagttcacctattcaagcccaaccccagacatggaggagctgcagccagtgtatgtcaatgtgggctctgtagatgtggatgtggtttattctcaggtctggagcatgcagcagccagaaagctcagcaaacatcaggacacttctggagaacaaggactcccaagtcatctactcttctgtgaagaaatcataa

SEQ ID NO: 150 - protein, 777 aa, Homo sapiens
MLLWLLLLILTPGREQSGVAPKAVLLLNPPWSTAFKGEKVALICSSISHSLAQGDTYWYHDEKLLKIKHDKIQITEPGNYQCKTRGSSLSDAVHVEFSPDWLILQALHPVFEGDNVILRCQGKDNKNTHQKVYYKDGKQLPNSYNLEKITVNSVSRDNSKYHCTAYRKFYILDIEVTSKPLNIQVQELFLHPVLRASSSTPIEGSPMTLTCETQLSPQRPDVQLQFSLFRDSQTLGLGWSRSPRLQIPAMWTEDSGSYWCEVETVTHSIKKRSLRSQIRVQRVPVSNVNLEIRPTGGQLIEGENMVLICSVAQGSGTVTFSWHKEGRVRSLGRKTQRSLLAELHVLTVKESDAGRYYCAADNVHSPILSTWIRVTVRIPVSHPVLTFRAPRAHTVVGDLLELHCESLRGSPPILYRFYHEDVTLGNSSAPSGGGASFNLSLTAEHSGNYSCDADNGLGAQHSHGVSLRVTVPVSRPVLTLRAPGAQAVVGDLLELHCESLRGSPPILYRFYHEDVTLGNSSAPSGGGASFNLSLTAEHSGNYSCDAHNGLGAQHSHGVSLRVTVPVSRPILTLRAPRAQAVVGDLLELHCEALRGSPPILYWFYHEDVTLGNISAPSGGGASFNLSLTAEHSGNYSCEANNGLGAQRSEAVPVSISGPDGYRRDLMTAGVLWGLFGVLGFTGVALLLYALFHKISGESSATNEPRGASRPNPQEFTYSSPTPDMEELQPVYVNVGSVDVDVVYSQVWSMQQPESSANIRTLLENKDSQVIYSSVKKS

SEQ ID NO: 151 - DNA, 666 bp, Homo sapiens
  CDS (1)...(666)
atgcttctgtggctgctgctgctgatcctgactcctggaagagaacaatcaggggtggccccaaaagctgtacttctcctcaatcctccatggtccacagccttcaaaggagaaaaagtggctctcatatgcagcagcatatcacattccctagcccagggagacacatattggtatcacgatgagaagttgttgaaaataaaacatgacaagatccaaattacagagcctggaaattaccaatgtaagacccgaggatcctccctcagtgatgccgtgcatgtggaattttcacctgactggctgatcctgcaggctttacatcctgtctttgaaggagacaatgtcattctgagatgtcaggggaaagacaacaaaaacactcatcaaaaggtttactacaaggatggaaaacagcttcctaatagttataatttagagaagatcacagtgaattcagtctccagggataatagcaaatatcattgtactgcttataggaagttttacatacttgacattgaagtaacttcaaaacccctaaatatccaagttcaagagatagccagaccctcggattgggctggagcaggtcccccagactccagattcctgccatgtggactgaagactcagggtcttactggtgtgaggtggagacagtga

SEQ ID NO: 152 - protein, 221 aa, Homo sapiens
MLLWLLLLILTPGREQSGVAPKAVLLLNPPWSTAFKGEKVALICSSISHSLAQGDTYWYHDEKLLKIKHDKIQITEPGNYQCKTRGSSLSDAVHVEFSPDWLILQALHPVFEGDNVILRCQGKDNKNTHQKVYYKDGKQLPNSYNLEKITVNSVSRDNSKYHCTAYRKFYILDIEVTSKPLNIQVQEIARPSDWAGAGPPDSRFLPCGLKTQGLTGVRWRQ

SEQ ID NO: 153 - DNA, 2880 bp, Homo sapiens
catttaggaaggtctcatctgagtagcagcttcctgccctccttcttggagataagtcgggcttttggtgagacagactttcccaaccctctgcccggccggtgcccatgcttctgtggctgctgctgctgatcctgactcctggaagagaacaatcaggggtggccccaaaagctgtacttctcctcaatcctccatggtccacagccttcaaaggagaaaaagtggctctcatatgcagcagcatatcacattccctagcccagggagacacatattggtatcacgatgagaagttgttgaaaataaaacatgacaagatccaaattacagagcctggaaattaccaatgtaagacccgaggatcctccctcagtgatgccgtgcatgtggaattttcacctgactggctgatcctgcaggctttacatcctgtctttgaaggagacaatgtcattctgagatgtcaggggaaagacaacaaaaacactcatcaaaaggtttactacaaggatggaaaacagcttcctaatagttataatttagagaagatcacagtgaattcagtctccagggataatagcaaatatcattgtactgcttataggaagttttacatacttgacattgaagtaacttcaaaacccctaaatatccaagttcaagagctgtttctacatcctgtgctgagagccagctcttccacgcccatagaggggagtcccatgaccctgacctgtgagacccagctctctccacagaggccagatgtccagctgcaattctccctcttcagagatagccagaccctcggattgggctggagcaggtcccccagactccagatccctgccatgtggactgaagactcagggtcttactggtgtgaggtggagacagtgactcacagcatcaaaaaaaggagcctgagatctcagatacgtgtacagagagtccctgtgtctaatgtgaatctagagatccggcccaccggagggcagctgattgaaggagaaaatatggtccttatttgctcagtagcccagggttcagggactgtcacattctcctggcacaaagaaggaagagtaagaagcctgggtagaaagacccagcgttccctgttggcagagctgcatgttctcaccgtgaaggagagtgatgcagggagatactactgtgcagctgataacgttcacagccccatcctcagcacgtggattcgagtcaccgtgagaattccggtatctcaccctgtcctcaccttcagggctcccagggcccacactgtggtgggggacctgctggagcttcactgtgagtccctgagaggctctcccccgatcctgtaccgattttatcatgaggatgtcaccctggggaacagctcagccccctctggaggaggagcctccttcaacctctctctgactgcagaacattctggaaactactcctgtgatgcagacaatggcctgggggcccagcacagtcatggagtgagtctcagggtcacagttccggtgtctcgccccgtcctcaccctcagggctcccggggcccaggctgtggtgggggacctgctggagcttcactgtgagtccctgagaggctctcccccgatcctgtaccgattttatcatgaggatgtcaccctggggaacagctcagccccctctggaggaggagcctccttcaacctctctctgactgcagaacattctggaaactactcctgtgatgcacacaatggcctgggggcccagcacagtcatggagtgagtctcagggtcacagttcccgtgtctcgccccatcctcaccctcagggctcccagggcccaggctgtggtgggggacctgctggagcttcactgtgaggccctgagaggctctcccccgatcctgtactggttttatcatgaggatgtcaccctggggaacatctcagccccctctggaggaggggcctccttcaacctctctctgactgcagaacattctggaaactactcctgtgaggccaacaacggcctgggggcccagcgcagtgaggcagtgccagtctccatctcaggacctgatggctatagaagagacctcatgacagctggagttctctggggactgtttggtgtccttggtttcactggtgttgctttgctgttgtatgccttgttccacaagatatcaggagaaagttctgccactaatgaacccagaggggcttccaggccaaatcctcaagagttcacctattcaagcccaaccccagacatggaggagctgcagccagtgtatgtcaatgtgggctctgtagatgtggatgtggtttattctcaggtctggagcatgcagcagccagaaagctcagcaaacatcaggacacttctggagaacaaggactcccaagtcatctactcttctgtgaagaaatcataacacttggaggaatcagaagggaagatcaacagcaaggatggggcattattaagacttgctataaaaccttatgaaaatgcttgaggcttatcacctgccacagccagaacgtgcctcaggaggcacctcctgtcatttttgtcctgatgatgtttcttctccaatatcttcttttacctatcaatattcattgaactgctgctacatccagacactgtgcaaataaattatttctgctaccttctcttaagcaatcagtgtgtaaagatttgagggaagaatgaataagagatacaaggtctcaccttcatctactgtgaagtgatgagaacaggacttgatagtggtgtattaacttatttatgtgctgctggatacagtttgctaatattttgttgagaatttttgcaaatatgttcattgggaatattggcctgaa

SEQ ID NO: 154 - DNA, 2001 bp, Homo sapiens
  CDS (1)...(2001)
atgctgctgtgggtgatattactggtcctggctcctgtcagtggacagtttgcaaggacacccaggcccattattttcctccagcctccatggaccacagtcttccaaggagagagagtgaccctcacttgcaagggatttcgcttctactcaccacagaaaacaaaatggtaccatcggtaccttgggaaagaaatactaagagaaaccccagacaatatccttgaggttcaggaatctggagagtacagatgccaggcccagggctcccgtctcagtagccgtgtgcacttggatttttcttcagcttcgctgatcctgcaagctccactttctgtgtttgaaggagactctgtggttctgaggtgccgggcaaaggcggaagtaacactgaataatactatttacaagaatgataatgtcctggcattccttaataaaagaactgacttccatattcctcatgcatgtctcaaggacaatggtgcatatcgctgtactggatataaggaaagttgttgccctgtttcttccaatacagtcaaaatccaagtccaagagccatttacacgtccagtgctgagagccagctccttccagcccatcagcgggaacccagtgaccctgacctgtgagacccagctctctctagagaggtcagatgtcccgctccggttccgcttcttcagagatgaccagaccctgggattaggctggagtctctccccgaatttccagattactgccatgtggagtaaagattcagggttctactggtgtaaggcagcaacaatgccttacagcgtcatatctgacagcccgagatcctggatacaggtgcagatccctgcatctcatcctgtcctcactctcagccctgaaaaggctctgaattttgagggaaccaaggtgacacttcactgtgaaacccaggaagattctctgcgcactttgtacaggttttatcatgagggtgtccccctgaggcacaagtcagtccgctgtgaaaggggagcatccatcagcttctcactgactacagagaattcagggaactactactgcacagctgacaatggccttggcgccaagcccagtaaggctgtgagcctctcagtcactgttcccgtgtctcatcctgtcctcaacctcagctctcctgaggacctgatttttgagggagccaaggtgacacttcactgtgaagcccagagaggttcactccccatcctgtaccagtttcatcatgagggtgctgccctggagcgtaggtcggccaactctgcaggaggagtggccatcagcttctctctgactgcagagcattcagggaactactactgcacagctgacaatggctttggcccccagcgcagtaaggcggtgagcctctccgtcactgtccctgtgtctcatcctgtcctcaccctcagctctgctgaggccctgacttttgaaggagccactgtgacacttcactgtgaggccccgagaggctctcccccaatcctgtactggttttatcatgaggatgtcaccctggggagcagctcagccccctctggaggagaagcttctttcaacctctctctgactgcagaacattctggaaactactcatgtgaggccaacaatggcctagtggcccagcacagtgacacaatatcactcagtgttatagttccagtatctcgtcccatcctcaccttcagggctcccagggcccaggctgtggtgggggacctgctggagcttcactgtgaggccctgagaggctcctccccaatcctgtactggttttatcatgaagatgtcaccctgggtaagatctcagccccctctggaggaggggcctccttcaacctctctctgactacagaacattctggaatctactcctgtgaggcagacaatggtctggaggcccagcgcagtgagatggtgacactgaaagttgcaggtgagtgggccctgcccaccagcagcacatctgagaactga

SEQ ID NO: 155 - protein, 666 aa, Homo sapiens
MLLWVILLVLAPVSGQFARTPRPIIFLQPPWTTVFQGERVTLTCKGFRFYSPQKTKWYHRYLGKEILRETPDNILEVQESGEYRCQAQGSRLSSRVHLDFSSASLILQAPLSVFEGDSVVLRCRAKAEVTLNNTIYKNDNVLAFLNKRTDFHIPHACLKDNGAYRCTGYKESCCPVSSNTVKIQVQEPFTRPVLRASSFQPISGNPVTLTCETQLSLERSDVPLRFRFFRDDQTLGLGWSLSPNFQITAMWSKDSGFYWCKAATMPYSVISDSPRSWIQVQIPASHPVLTLSPEKALNFEGTKVTLHCETQEDSLRTLYRFYHEGVPLRHKSVRCERGASISFSLTTENSGNYYCTADNGLGAKPSKAVSLSVTVPVSHPVLNLSSPEDLIFEGAKVTLHCEAQRGSLPILYQFHHEGAALERRSANSAGGVAISFSLTAEHSGNYYCTADNGFGPQRSKAVSLSVTVPVSHPVLTLSSAEALTFEGATVTLHCEAPRGSPPILYWFYHEDVTLGSSSAPSGGEASFNLSLTAEHSGNYSCEANNGLVAQHSDTISLSVIVPVSRPILTFRAPRAQAVVGDLLELHCEALRGSSPILYWFYHEDVTLGKISAPSGGGASFNLSLTTEHSGIYSCEADNGLEAQRSEMVTLKVAGEWALPTSSTSEN

SEQ ID NO: 156 - DNA, 2489 bp, Homo sapiens
gagagcacagcttctcagatgtgctccttggagctggtgtgcagtgtcctgactgtaagatcaagtccaaacctgttttggaattgaggaaacttctcttttgatctcagcccttggtggtccaggtcttcatgctgctgtgggtgatattactggtcctggctcctgtcagtggacagtttgcaaggacacccaggcccattattttcctccagcctccatggaccacagtcttccaaggagagagagtgaccctcacttgcaagggatttcgcttctactcaccacagaaaacaaaatggtaccatcggtaccttgggaaagaaatactaagagaaaccccagacaatatccttgaggttcaggaatctggagagtacagatgccaggcccagggctcccgtctcagtagccgtgtgcacttggatttttcttcagcttcgctgatcctgcaagctccactttctgtgtttgaaggagactctgtggttctgaggtgccgggcaaaggcggaagtaacactgaataatactatttacaagaatgataatgtcctggcattccttaataaaagaactgacttccatattcctcatgcatgtctcaaggacaatggtgcatatcgctgtactggatataaggaaagttgttgccctgtttcttccaatacagtcaaaatccaagtccaagagccatttacacgtccagtgctgagagccagctccttccagcccatcagcgggaacccagtgaccctgacctgtgagacccagctctctctagagaggtcagatgtcccgctccggttccgcttcttcagagatgaccagaccctgggattaggctggagtctctccccgaatttccagattactgccatgtggagtaaagattcagggttctactggtgtaaggcagcaacaatgccttacagcgtcatatctgacagcccgagatcctggatacaggtgcagatccctgcatctcatcctgtcctcactctcagccctgaaaaggctctgaattttgagggaaccaaggtgacacttcactgtgaaacccaggaagattctctgcgcactttgtacaggttttatcatgagggtgtccccctgaggcacaagtcagtccgctgtgaaaggggagcatccatcagcttctcactgactacagagaattcagggaactactactgcacagctgacaatggccttggcgccaagcccagtaaggctgtgagcctctcagtcactgttcccgtgtctcatcctgtcctcaacctcagctctcctgaggacctgatttttgagggagccaaggtgacacttcactgtgaagcccagagaggttcactccccatcctgtaccagtttcatcatgagggtgctgccctggagcgtaggtcggccaactctgcaggaggagtggccatcagcttctctctgactgcagagcattcagggaactactactgcacagctgacaatggctttggcccccagcgcagtaaggcggtgagcctctccgtcactgtccctgtgtctcatcctgtcctcaccctcagctctgctgaggccctgacttttgaaggagccactgtgacacttcactgtgaggccccgagaggctctcccccaatcctgtactggttttatcatgaggatgtcaccctggggagcagctcagccccctctggaggagaagcttctttcaacctctctctgactgcagaacattctggaaactactcatgtgaggccaacaatggcctagtggcccagcacagtgacacaatatcactcagtgttatagttccagtatctcgtcccatcctcaccttcagggctcccagggcccaggctgtggtgggggacctgctggagcttcactgtgaggccctgagaggctcctccccaatcctgtactggttttatcatgaagatgtcaccctgggtaagatctcagccccctctggaggaggggcctccttcaacctctctctgactacagaacattctggaatctactcctgtgaggcagacaatggtctggaggcccagcgcagtgagatggtgacactgaaagttgcaggtgagtgggccctgcccaccagcagcacatctgagaactgactgtgcctgttctccctgcagctgaaaatggagccacagagctcctcagggctgtttgcttgtgtggcatcccagcacacttcctgcctgcagaacctccctgtgaaagtctcggatcctttgtggtatggttccaggaatctgatgtttcccagcagtcttcttgaagatgatcaaagcacctcactaaaaatgcaaataagacttttttagaacataaactatattctgaactgaaattattacatgaaaatgaaaccaaagaattctgagcatatgtttctctgccgtagaaaggattaagctgtttctttgtcccggattctttctcttcattggactttctaacaaagccct

SEQ ID NO: 157 - DNA, 1251 bp, Homo sapiens
  CDS (1)...(1251)
atgaagagagaaaggggagccctgtccagagcctccagggccctgcgccttgctccttttgtctaccttcttctgatccagacagaccccctggagggggtgaacatcaccagccccgtgcgcctgatccatggcaccgtggggaagtcggctctgctttctgtgcagtacagcagtaccagcagcgacaggcctgtagtgaagtggcagctgaagcgggacaagccagtgaccgtggtgcagtccattggcacagaggtcatcggcaccctgcggcctgactatcgagaccgtatccgactctttgaaaatggctccctgcttctcagcgacctgcagctggccgatgagggcacctatgaggtcgagatctccatcaccgacgacaccttcactggggagaagaccatcaaccttactgtagatgtgcccatttcgaggccacaggtgttggtggcttcaaccactgtgctggagctcagcgaggccttcaccttgaactgctcacatgagaatggcaccaagcccagctacacctggctgaaggatggcaagcccctcctcaatgactcgagaatgctcctgtcccccgaccaaaaggtgctcaccatcacccgcgtgctcatggaggatgacgacctgtacagctgcrtggtggagaaccccatcagccagggccgcagcctgcctgtcaagatcaccgtatacagaagaagctccctttacatcatcttgtctacaggaggcatcttcctccttgtgaccttggtgacagtctgtgcctgctggaaaccctccaaaaggaaacagaagaagctagaaaagcaaaactccctggaatacatggatcagaatgatgaccgcctgaaaccagaagcagacaccctccctcgaagtggtgagcaggaacggaagaaccccatggcactctatatcctgaargacaaggactccccggagaccgaggagaacccggccccggagcctcgaagcgcgacggagcccggcccgcccggctactccgtgtctcccgccgtgcccggccgctcgccggggctgcccatccgctctgcccgccgctacccgcgctccccagcgcgctccccagccaccggccggacacactcgtcgccgcccagggccccgagctcgcccggccgctcgcgcagcgcctcgcgcacactgcggactgcgggcgtgcacataatccgcgagcaagacgaggccggcccggtggagatcagcgcctga

SEQ ID NO: 158 - protein, 416 aa, Homo sapiens
  VARIANT (1)...(416): Xaa = Any Amino Acid
MKRERGALSRASRALRLAPFVYLLLIQTDPLEGVNITSPVRLIHGTVGKSALLSVQYSSTSSDRPVVKWQLKRDKPVTVVQSIGTEVIGTLRPDYRDRIRLFENGSLLLSDLQLADEGTYEVEISITDDTFTGEKTINLTVDVPISRPQVLVASTTVLELSEAFTLNCSHENGTKPSYTWLKDGKPLLNDSRMLLSPDQKVLTITRVLMEDDDLYSCXVENPISQGRSLPVKITVYRRSSLYIILSTGGIFLLVTLVTVCACWKPSKRKQKKLEKQNSLEYMDQNDDRLKPEADTLPRSGEQERKNPMALYILKDKDSPETEENPAPEPRSATEPGPPGYSVSPAVPGRSPGLPIRSARRYPRSPARSPATGRTHSSPPRAPSSPGRSRSASRTLRTAGVHIIREQDEAGPVEISA

SEQ ID NO: 159 - DNA, 906 bp, Homo sapiens
  CDS (1)...(906)
atgccgcgctcgcggggacgggagctggggcgctgcggctgccccgcggggagggctcgcggcgaaaccgggatttcggcgcttgtgccgggcgccgggagccgctggggccgcccgccgccgccaacgccgccgcctctgctgctgttgctgggctgtgggttgctcagcgtctcggccgccgcgggccagaactgcacgttccaactgcacggtcccaatgggacagttgagagcccagggttcccatatggctaccccaattacgccaactgcacgtggaccatcaccgcggaagagcagcacagaatccagcttgtgttccagtcctttgccctggaagaggactttgatgtcctgtcggtgtttgatggtccaccccagccagagaatctgcgtacgaggctcacaggctttcagctgccagccaccattgttagtgcagccaccaccctctctctgcgcctcatcagcgactatgcagtcagtgcccaaggcttccacgccacctatgaagttctccccagccacacatgtgggaacccagggaggctgcccaatggcatccagcagggttcaaccttcaacctcggtgacaaggtccgctacagctgcaaccttggcttcttcctggagggccacgccgtgctcacctgccacgctggctctgagaacagcgccacgtgggacttccccctgccttcctgcagaggtaggtggccagcaaggggtctgacagagtggggcagtggctgggaggtgatgctggagcttccagtgacatccagtctcaaagggcaaagctacaccccagcagggaggggggtacccaagtctggacagcacagagggttttcagggtcctcaagtgttctaggggtatttcaacctcacctgacctcctaa

SEQ ID NO: 160 - protein, 301 aa, Homo sapiens
MPRSRGRELGRCGCPAGRARGETGISALVPGAGSRWGRPPPPTPPPLLLLLGCGLLSVSAAAGQNCTFQLHGPNGTVESPGFPYGYPNYANCTWTITAEEQHRIQLVFQSFALEEDFDVLSVFDGPPQPENLRTRLTGFQLPATIVSAATTLSLRLISDYAVSAQGFHATYEVLPSHTCGNPGRLPNGIQQGSTFNLGDKVRYSCNLGFFLEGHAVLTCHAGSENSATWDFPLPSCRGRWPARGLTEWGSGWEVMLELPVTSSLKGQSYTPAGRGVPKSGQHRGFSGSSSVLGVFQPHLTS

SEQ ID NO: 161 - DNA, 558 bp, Homo sapiens
  CDS (1)...(558)
atgccgcgctcgcggggacgggagctggggcgctgcggctgccccgcggggagggctcgcggcgaaaccgggatttcggcgcttgtgccgggcgccgggagccgctggggccgcccgccgccgccaacgccgccgcctctgctgctgttgctgggctgtgggttgctcagcgtctcggccgccgcgggccagaactgcacgttccaactgcacggtcccaatgggacagttgagagcccagggttcccatatggctaccccaattacgccaactgcacgtggaccatcaccgcggaagagcagcacagaatccagcttgtgttccagtcctttgccctggaagaggactttgatgtcctgtcggtgtttgatggtccaccccagccagagaatctgcgtacgaggctcacaggctttcagctgccagccaccattgttagtgcagccaccaccctctctctgcgcctcatcagcgactatgcagtcagtgcccaaggcttccacgccacctatgaaggtaagtgcctccctcatcggccacaggagccggagatgtga

SEQ ID NO: 162 - protein, 185 aa, Homo sapiens
MPRSRGRELGRCGCPAGRARGETGISALVPGAGSRWGRPPPPTPPPLLLLLGCGLLSVSAAAGQNCTFQLHGPNGTVESPGFPYGYPNYANCTWTITAEEQHRIQLVFQSFALEEDFDVLSVFDGPPQPENLRTRLTGFQLPATIVSAATTLSLRLISDYAVSAQGFHATYEGKCLPHRPQEPEM

SEQ ID NO: 163 - DNA, 1520 bp, Homo sapiens
ggaggactgaacttaaaagaaactggtcaattgcaaaacagacacggataaacaaccctttagatgtaatttgtggtttatctggaggtggaggtggcgctgaagaggaacccccgccccccaatattttatccttagctgcgcctccacccccagcatttggagcggcggagaagcggctccggagtgattaatccggggataattcaccccctcccgccccccggcgcgaaccccgcgaagcgggattggagcgagtcatttccgagagcgcagcgcgcctctccccggccgggcggacacttggttcattccagccgcagaagctcagggctcccgcgtaccgggattttttccgagcagaaaaaagctccagagctctcctgacctcctttctcctcggcggcgagcggagcctctccctcggcgctgccggccgcgccatgccgcgctcgcggggacgggagctggggcgctgcggctgccccgcggggagggctcgcggcgaaaccgggatttcggcgcttgtgccgggcgccgggagccgctggggccgcccgccgccgccaacgccgccgcctctgctgctgttgctgggctgtgggttgctcagcgtctcggccgccgcgggccagaactgcacgttccaactgcacggtcccaatgggacagttgagagcccagggttcccatatggctaccccaattacgccaactgcacgtggaccatcaccgcggaagagcagcacagaatccagcttgtgttccagtcctttgccctggaagaggactttgatgtcctgtcggtgtttgatggtccaccccagccagagaatctgcgtacgaggctcacaggctttcagctgccagccaccattgttagtgcagccaccaccctctctctgcgcctcatcagcgactatgcagtcagtgcccaaggcttccacgccacctatgaagttctccccagccacacatgtgggaacccagggaggctgcccaatggcatccagcagggttcaaccttcaacctcggtgacaaggtccgctacagctgcaaccttggcttcttcctggagggccacgccgtgctcacctgccacgctggctctgagaacagcgccacgtgggacttccccctgccttcctgcagaggtaggtggccagcaaggggtctgacagagtggggcagtggctgggaggtgatgctggagcttccagtgacatccagtctcaaagggcaaagctacaccccagcagggaggggggtacccaagtctggacagcacagagggttttcagggtcctcaagtgttctaggggtatttcaacctcacctgacctcctaaccctcaagtgtgacctgcccgggcggccgctcgagccctatagtgagtcgtattagggccgctcgagccctatagtgagtcgtattagggccgctcgagccctatagtgagtcgtattagggccgctcgagccctatagtgagtcgtattagggccgctcgagccctatag

1. An isolated nucleic acid molecule comprising a nucleotide sequence that encodes the amino acid sequence of SEQ ID NO:2, 4, 6, 9, 11, 14, 16, 19, 21, 23, 25, 27, 29, 31, 33, 35, 37, 39, 41, 43, 45, 47, 49, 51, 53, 55, 57, 59, 61, 64, 66, 68, 70, 72, 74, 76, 78, 80, 82, 84, 86, 88, 90, 92, 94, 97, 99, 101, 103, 105, 107, 110, 112, 114, 116, 118, 120, 123, 125, 127, 129, 131, 134, 136, 138, 140, 142, 144, 146, 148, 150, 152, 155, 158, 160, or 162.

2. The isolated nucleic acid molecule of claim 1, wherein said nucleic acid molecule comprises the nucleotide sequence of SEQ ID NO:1, 3, 5, 8, 10, 13, 15, 18, 20, 22, 24, 26, 28, 30, 32, 34, 36, 38, 40, 42, 44, 46, 48, 50, 52, 54, 56, 58, 60, 63, 65, 67, 69, 71, 73, 75, 77, 79, 81, 83, 85, 87, 89, 91, 93, 96, 98, 100, 102, 104, 106, 109, 111, 113, 115, 117, 119, 122, 124, 126, 128, 130, 133, 135, 137, 139, 141, 143, 145, 147, 149, 151, 154, 157, 159, or 161.

3. An expression vector comprising the isolated nucleic acid molecule of claim 1.

4. An isolated polypeptide comprising the amino acid sequence of SEQ ID NO:2, 4, 6, 9, 11, 14, 16, 19, 21, 23, 25, 27, 29, 31, 33, 35, 37, 39, 41, 43, 45, 47, 49, 51, 53, 55, 57, 59, 61, 64, 66, 68, 70, 72, 74, 76, 78, 80, 82, 84, 86, 88, 90, 92, 94, 97, 99, 101, 103, 105, 107, 110, 112, 114, 116, 118, 120, 123, 125, 127, 129, 131, 134, 136, 138, 140, 142, 144, 146, 148, 150, 152, 155, 158, 160, or 162.

5. The isolated polypeptide of claim 4, comprising the amino acid sequence of SEQ ID NO: 97, 99, 101, 103, 105, 107, 110, 118, 120, 123, 125, 131, 134, 136, 138, 140, 142, 144, 146, 148, or 158.

6. The isolated nucleic acid molecule of claim 1, wherein said nucleic acid molecule encodes the amino acid sequence of SEQ ID NO: 97, 99, 101, 103, 105, 107, 110, 118, 120, 123, 125, 131, 134, 136, 138, 140, 142, 144, 146, 148, or 158.

7. The isolated nucleic acid molecule of claim 1, wherein said nucleic acid molecule comprises the nucleotide sequence of SEQ ID NO: 96, 98, 100, 102, 104, 106, 117, 119, 122, 124, 130, 133, 135, 137, 139, 141, 143, 145, 147, or 157.

8. An oligonucleotide that inhibits the expression of a nucleic acid molecule that encodes an amino acid sequence of SEQ ID NO: 2, 4, 6, 9, 11, 14, 16, 19, 21, 23, 25, 27, 29, 31, 33, 35, 37, 39, 41, 43, 45, 47, 49, 51, 53, 55, 57, 59, 61, 64, 66, 68, 70, 72, 74, 76, 78, 80, 82, 84, 86, 88, 90, 92, 94, 97, 99, 101, 103, 105, 107, 110, 112, 114, 116, 118, 120, 123, 125, 127, 129, 131, 134, 136, 138, 140, 142, 144, 146, 148, 150, 152, 155, 158, 160, or 162.

9. The oligonucleotide of claim 8, wherein said nucleic acid molecule encodes the amino acid sequence of SEQ ID NO: 97, 99, 101, 103, 105, 107, 110, 118, 120, 123, 125, 131, 134, 136, 138, 140, 142, 144, 146, 148, or 158.

10. An antibody that selectively binds a polypeptide comprising an amino acid sequence of SEQ ID NOS: 2, 4, 6, 9, 11, 14, 16, 19, 21, 23, 25, 27, 29, 31, 33, 35, 37, 39, 41, 43, 45, 47, 49, 51, 53, 55, 57, 59, 61, 64, 66, 68, 70, 72, 74, 76, 78, 80, 82, 84, 86, 88, 90, 92, 94, 97, 99, 101, 103, 105, 107, 110, 112, 114, 116, 118, 120, 123, 125, 127, 129, 131, 134, 136, 138, 140, 142, 144, 146, 148, 150, 152, 155, 158, 160, or 162.

11. The antibody claim 10, wherein said polypeptide comprises the amino acid sequence of SEQ ID NO: 97, 99, 101, 103, 105, 107, 110, 118, 120, 123, 125, 131, 134, 136, 138, 140, 142, 144, 146, 148, or 158.
